(19) United States
(12) Patent Application Publication
(10) Pub. No.: US 2009/0186347 A1
(43) Pub. Date: Jul. 23, 2009

(54) Markers for metabolic syndrome

(76) Inventors: David R. Cox, Belmont, CA (US); Kelly A. Frazer, San Mateo, CA (US); David A. Hinds, Sunnyvale, CA (US); Craig L. Hyde, Old Lyme, CT (US); John F. Thompson, Warwick, RI (US)

Correspondence Address: Goodwin Procter LLP;Attn: Patent Administrator, 135 Commonwealth Drive, Menlo Park, CA, 94025-1105, US

(21) Appl. No.: 12/152,141

(22) Filed: May 9, 2008

Related U.S. Application Data
(60) Provisional application No. 60/930,033, filed on May 11, 2007.

(51) Int. Cl. C12Q 1/68

(52) U.S. Cl. 435/6

(57) ABSTRACT

Correlations between polymorphisms and metabolic syndrome, insulin resistance, obesity, high blood pressure, dyslipidemia, diabetes and/or myocardial infarction are provided. Methods of diagnosing and treating metabolic syndrome, insulin resistance, obesity, high blood pressure, dyslipidemia, diabetes and/or myocardial infarction are provided. Systems and kits for diagnosis and treatment of metabolic syndrome, insulin resistance, obesity, high blood pressure, dyslipidemia, diabetes and/or myocardial infarction are provided.

### CROSS-REFERENCE TO RELATED APPLICATION

[0001] This application is a non-provisional application filed under 37 CFR 1.53(b)(1), claiming priority under 35 USC 119(e) to provisional application No. 60/930,033 filed May 11, 2007, the contents of which are incorporated herein by reference.

### BACKGROUND OF THE INVENTION

[0002] Metabolic syndrome is a collection of health disorders or risks that increase the chance of developing heart disease, stroke, and diabetes. The condition is also known by other names, including Syndrome X, insulin resistance syndrome, and dysmetabolic syndrome. Metabolic syndrome can include any of a variety of underlying metabolic phenotypes, including insulin resistance and/or obesity predisposition phenotypes.

[0003] Metabolic syndrome is often characterized by any of a number of metabolic disorders or risk factors, which are generally considered to most typify metabolic syndrome when more than one of these factors are present in a single individual. The factors include: central obesity (disproportionate fat tissue in and around the abdomen), atherogenic dyslipidemia (these include a family of blood fat disorders including, e.g., high triglycerides, low HDL cholesterol, and high LDL cholesterol that can foster plaque buildups in the vascular system, including artery walls), high blood pressure (130/85 mmHg or higher), insulin resistance or glucose intolerance (the inability to properly use insulin or blood sugar), a chronic prothrombotic state (e.g., characterized by high fibrinogen or plasminogen activator inhibitor [−1] levels in the blood), and a chronic proinflammatory state (e.g., characterized by higher than normal levels of high-sensitivity C-reactive protein in the blood). People with metabolic syndrome are at increased risk of coronary heart disease, other diseases related to plaque buildups in artery walls (e.g., stroke and peripheral vascular disease) and Type 2 Diabetes.

[0004] Metabolic syndrome is extremely common, particularly in the United States, where roughly 50 million people are thought to have the disorder. Roughly one in five Americans has metabolic syndrome. The number of people with metabolic syndrome increases with age, affecting more than 40 percent of people in their 60s and 70s. The underlying causes of metabolic syndrome are, in many respects, quite unclear-though certain effects of the disorder such as obesity and lack of physical activity are often causal in nature as well. Given inheritance patterns for the disorder, there also appear to be genetic factors that underlie the syndrome.

[0005] For example, some people with metabolic syndrome are genetically predisposed to insulin resistance, which typically leads to obesity. On the other hand, obesity can and does also elicit insulin resistance. Thus, while it is true that most people with insulin resistance have central obesity, it is not always clear whether insulin resistance causes central obesity or whether central obesity causes insulin resistance. The underlying biological mechanism(s) between insulin resistance and metabolic risk factors (at the molecular level) are not fully understood and are also likely to be quite complex.

[0006] Not only is metabolic syndrome likely a result of several interacting genetic and environmental factors, but the criteria for diagnosing metabolic syndrome are somewhat variable. Criteria considered most relevant by the “Third Report of the National Cholesterol Education Program (NCEP) Expert Panel on Detection, Evaluation, and Treatment of High Blood Cholesterol in Adults (Adult Treatment Panel III)” in the diagnosis of metabolic disorder provide one widely used current set of diagnostic criteria.

[0007] Under the NCEP criteria, metabolic syndrome can be clinically identified by presence of three or more of the following components in a single patient: (1) central obesity, as measured by waist circumference (women with a waist circumference greater than 35 inches; for men greater than 40 inches); (2) fasting blood triglycerides greater than or equal to 150 mg/dL; (3) blood HDL cholesterol (for women less than 50 mg/dL, for men less than 40 mg/dL); (4) blood pressure greater than or equal to 130/85 mmHg; and (5) fasting glucose greater than or equal to 110 mg/dL. Other features such as insulin resistance (e.g., increased fasting blood insulin), prothrombotic state or proinflammatory state are not generally required for clinical diagnosis, though they are certainly also indicative of metabolic syndrome and follow-up studies on these attributes can be used to further confirm diagnosis of metabolic syndrome. For example, insulin resistance, even in the absence of the NCEP criteria, is often indicative of metabolic syndrome.

[0008] Treatment for metabolic syndrome, obesity, insulin resistance, high blood pressure, dyslipidemia, etc., can include a variety of clinical approaches, including weight loss and exercise (these two safest and most effective treatments are also often quite difficult to achieve in practice), and dietary changes. These dietary changes include: maintaining a diet that limits carbohydrates to 50 percent or less of total calories; eating foods defined as complex carbohydrates, such as whole grain bread (instead of white), brown rice (instead of white), sugars that are unrefined, increasing fiber consumption by eating legumes (for example, beans), whole grains, fruits and vegetables, reducing intake of red meats and poultry, consumption of “healthy” fats, such as those in olive oil, flaxseed oil and nuts, limiting alcohol intake, etc. In addition, treatment of blood pressure, and blood triglyceride levels can be controlled by a variety of available drugs (e.g., cholesterol modulating drugs), as can clotting disorders (e.g., via aspirin therapy) and in general, prothrombotic or proinflammatory states. If metabolic syndrome leads to diabetes, there are, of course, many treatments available for this disease, including those noted above, in conjunction with insulin treatment.

[0009] Thus, while there are a variety of strategies for treatment of metabolic syndrome, obesity predisposition, insulin resistance, high blood pressure, dyslipidemia, etc., such as diet and exercise, drug therapy, etc., the molecular basis for these disorders is not clear, making diagnosis or prognosis of these metabolic disorders problematic and the design of therapeutic agents to treat them quite difficult.

[0010] Thus, while a considerable amount is known about metabolic syndrome at the clinical level, disease diagnosis for this central human disease and its related disorders is relatively imprecise, and early detection of susceptible individuals is difficult. The present invention provides a number of new genetic correlations between metabolic syndrome (including e.g., obesity predisposition, insulin resistance, high blood pressure, and dyslipidemia), etc., and various polymorphic alleles, providing the basis for improved diagnosis of disease, early detection of susceptible individuals (e.g., before metabolic syndrome is clinically manifested), targets for potential disease modulators, as well as an improved understanding of metabolic syndrome and its related disorders at the molecular and cellular level. These and other features of the invention will be apparent upon review of the following.

### SUMMARY OF THE INVENTION

[0011] This invention provides previously unknown correlations between various polymorphisms and metabolic syndrome phenotypes including metabolic syndrome, obesity, dyslipidemia, high blood pressure (e.g., hypertension), incidence of myocardial infarction, insulin resistance, and/or diabetes. The detection of these polymorphisms, accordingly, provides robust and precise methods and systems for identifying patients that have or are at risk for metabolic syndrome, obesity, dyslipidemia, high blood pressure (e.g., hypertension), incidence of myocardial infarction, insulin resistance, and/or diabetes. In addition, the identification of these polymorphisms provides high-throughput systems and methods for identifying modulators of metabolic syndrome, obesity, dyslipidemia, high blood pressure (e.g., hypertension), incidence of myocardial infarction, insulin resistance, and/or diabetes.

[0012] Accordingly, in a first aspect, methods of identifying a metabolic syndrome phenotype, including presence or absence of metabolic syndrome, obesity (e.g., based on BMI or waist circumference), dyslipidemia (e.g., based on HDL or triglyceride levels), high systolic or diastolic blood pressure, hypertension, incidence of myocardial infarction, insulin resistance (e.g., based on HOMA score), diabetes, and/or abnormal insulin levels for an organism or biological sample derived therefrom are provided. The method includes detecting, in the organism or biological sample, a polymorphism of a genetic locus (e.g., a gene or at a locus closely linked thereto). Example genes and other genetic loci are provided in Tables 1-14, 17 and 18 in which the polymorphisms listed are associated with one or more metabolic syndrome phenotypes, including metabolic syndrome, diabetes, incidence of myocardial infarction, hypertension, a high body mass index (BMI), a large waist circumference, a high diastolic blood pressure, a high systolic blood pressure, low HDL (high density lipoprotein) cholesterol levels, high blood triglyceride levels, insulin levels in nondiabetics, insulin levels in non-Mexicans, insulin resistance (based on HOMA score) in nondiabetics, and insulin resistance (based on HOMA score) in non-Mexicans, respectively. Similarly, detecting a polymorphism of Tables 1-14, or a locus closely linked thereto, can be used to identify a polymorphism associated with the metabolic syndrome phenotype. In either case, presence of the relevant polymorphism is correlated to the metabolic syndrome phenotype thereby identifying the relevant phenotype.

[0013] Any of the features of metabolic syndrome can constitute the relevant phenotype, e.g., metabolic syndrome, diabetes, incidence of myocardial infarction, hypertension, a high BMI, a large waist circumference, a high diastolic blood pressure, a high systolic blood pressure, low HDL cholesterol levels, high blood triglyceride levels, abnormal insulin levels, insulin resistance, central obesity, dyslipidemia (e.g., atherogenic dyslipidemia), glucose intolerance, a chronic prothrombotic state, a chronic proinflammatory state, etc. The various metabolic syndrome phenotypes overlap with metabolic syndrome, along with the markers used herein to detect them.

[0014] The organism or the biological sample can be, or can be derived from, a mammal. For example, the organism can be a human patient, or the biological sample can be derived from a human patient (blood, lymph, skin, tissue, saliva, primary or secondary cell cultures derived therefrom, etc.).

[0015] Detecting the polymorphism can include amplifying the polymorphism or a sequence associated therewith and detecting the resulting amplicon. For example, amplifying the polymorphism can include admixing an amplification primer or amplification primer pair with a nucleic acid template isolated from the organism or biological sample. The primer or primer pair is typically complementary or partially complementary to at least a portion of the gene or other polymorphism, or to a proximal sequence thereto, and is capable of initiating nucleic acid polymerization by a polymerase on the nucleic acid template. The amplification can also include extending the primer or primer pair in a DNA polymerization reaction using a polymerase and the template nucleic acid to generate the amplicon. The amplicon can be detected by hybridizing the amplicon to an array, digesting the amplicon with a restriction enzyme, real-time PCR analysis, sequencing of the amplicon, or the like. Optionally, amplification can include performing a polymerase chain reaction (PCR), reverse transcriptase PCR (RT-PCR), or ligase chain reaction (LCR) using nucleic acid isolated from the organism or biological sample as a template in the PCR, RT-PCR, or LCR. Other formats can include allele specific hybridization, single nucleotide extension, or the like.

[0016] The polymorphism can be any detectable polymorphism, e.g., a SNP. For example, the allele can be any of those noted in Tables 1-14, 17 and 18. The alleles can positively or negatively correlate to existence of or susceptibility to one or more metabolic syndrome phenotypes, including diabetes incidence of myocardial infarction, high blood pressure, obesity, insulin resistance, and/or dyslipidemia.

[0017] Polymorphisms closely linked to the polymorphisms of Tables 1-14, 17 and 18 can be used as markers for metabolic syndrome phenotypes. Such closely linked markers are typically about 20 cM or less, e.g., 15 cM or less, often 10 cM or less and, in certain preferred embodiments, 5 cM or less from the gene or other polymorphism of interest (e.g., an allelic marker locus in Tables 1-14). The linked markers can, of course be closer than 5 cM, e.g., 4, 3, 2, 1, 0.5, 0, 25, 0.1 cM or less from the gene or marker locus of Tables 1-14, 17 or 18. In general, the closer the linkage (or association), the more predictive the linked marker is of an allele of the gene or given marker locus (or association).

[0018] In one typical embodiment, correlating the polymorphism is performed by referencing a look up table that comprises correlations between alleles of the polymorphism and the phenotype. This table can be, e.g., a paper or electronic database comprising relevant correlation information. In one aspect, the database can be a multidimensional database comprising multiple correlations and taking multiple correlation relationships into account, simultaneously. Accessing the look up table can include extracting correlation information through a table look-up or can include more complex statistical analysis, such as principle component analysis (PCA), heuristic algorithms that track and/or update correlation information (e.g., neural networks), hidden Markov modeling, or the like.

[0019] Correlation information is useful for determining disease susceptibility (e.g., patient susceptibility to metabolic syndrome, obesity, insulin resistance, diabetes, high blood pressure, dyslipidemia, or myocardial infarction), disease diagnosis (e.g., diagnosis of metabolic syndrome), and disease prognosis (e.g., likelihood that conventional therapies such as diet and exercise will be effective, in light of patient genotype). Correlation information may also be useful for determining an appropriate medical treatment regimen for an individual exhibiting or susceptible to one or more metabolic syndrome phenotypes. In addition, for non-human applications, the ability to predict metabolic syndrome, obesity, insulin resistance, diabetes, high blood pressure, dyslipidemia, or myocardial infarction is useful, e.g., to livestock breeders who wish to perform marker-assisted breeding (by conventional or in vitro fertilization (IVF) assisted methods) to control, e.g., fat production in livestock. Thus, where the organism is a non-human mammal, the methods optionally further include selecting the non-human mammal, or germplasm (e.g., sperm or eggs) therefrom, from a population of non-human mammals, based upon the determined correlation to phenotype. The resulting selected non-human mammal can be bred with another non-human mammal (by conventional or IVF assisted methods) to optimize genotype and resulting phenotype in one or more offspring.

[0020] Kits that comprise, e.g., probes for identifying the markers herein, e.g., packaged in suitable containers with instructions for correlating detected alleles to a metabolic syndrome phenotype, including presence of or susceptibility to metabolic syndrome, obesity, high blood pressure, diabetes, dyslipidemia, insulin resistance, hypertension, abnormal insulin levels, myocardial infarction, etc. are a feature of the invention as well.

[0021] In an additional aspect, methods of identifying modulators of a metabolic syndrome phenotype are provided. The methods include contacting a potential modulator to a gene or gene product, such as a gene listed in Tables 1-14, and/or a gene product corresponding to any of these genes. An effect of the potential modulator on the gene or gene product is detected, thereby identifying whether the potential modulator modulates the metabolic syndrome phenotype. All of the features described above for the alleles, genes, markers, etc., are applicable to these methods as well.

[0022] Effects of interest for which one may screen include: (a) increased or decreased expression of any gene product of Tables 1-14, 17 and 18 in the presence of the modulator; (b) a change in the timing or location of expression of any gene product in Tables 1-14, 17 and 18 in the presence of the modulator; (c) a change in localization of proteins encoded by the genes of Tables 1-14, 17 and 18 in the presence of the modulator.

[0023] The invention also includes kits for treatment of a metabolic syndrome phenotype. In one aspect, the kit comprises a modulator identified by the method above and instructions for administering the compound to a patient to treat the metabolic syndrome phenotype.

[0024] In an additional aspect, systems for identifying a metabolic syndrome phenotype for an organism or biological sample derived therefrom are provided. Such systems include, e.g., a set of marker probes or primers configured to detect at least one allele of one or more gene, polymorphism or linked locus associated with the metabolic syndrome phenotype, wherein the gene or polymorphism comprises or encodes any gene, polymorphism, or gene product of Tables 1-14, 17 and 18. Typically, the set of marker probes or primers can include or detect a nucleotide sequence of Tables 1-14, 17 and 18 or an allele closely linked thereto. The system typically also includes a detector that is configured to detect one or more signal outputs (e.g., light emissions) from the set of marker probes or primers, or an amplicon produced from the set of marker probes or primers, thereby identifying the presence or absence of the allele. System instructions that correlate the presence or absence of the allele with the predicted metabolic syndrome phenotype, thereby identifying the metabolic syndrome phenotype for the organism or biological sample derived therefrom are also a feature of the system. The instructions can include at least one look-up table that includes a correlation between the presence or absence of the one or more alleles and the metabolic syndrome phenotype. The system can further include a sample, which is typically derived from a mammal, including e.g., a genomic DNA, an amplified genomic DNA, a cDNA, an amplified cDNA, RNA, or an amplified RNA.

[0025] In one aspect, the invention specifically relates to a method of identifying a metabolic syndrome phenotype for an organism, the method comprising:

[0026] detecting, in a biological sample from the organism, a polymorphism of a gene or a locus closely linked thereto, the gene selected from those listed in Tables 1-14, 17 and 18, wherein the polymorphism is associated with the metabolic syndrome phenotype; and,

[0027] correlating the polymorphism to the metabolic syndrome phenotype, thereby identifying the metabolic syndrome phenotype.

[0028] In one embodiment, the metabolic syndrome phenotype is altered triglyceride levels, where the polymorphism may, for example, be in the MLXIPL region on chromosome 7 at 7q11.23, or can be in or proximal to a gene located in the MLXIPL region on chromosome 7 at 7q11.23, listed in Table 18.

[0029] In another embodiment, the metabolic syndrome phenotype is higher plasma triglyceride levels. In this embodiment, the polymorphism may, for example, be a single nucleotide polymorphism (SNP) in the MLXIPL gene or a gene or a locus closely linked thereto. In particular embodiments, the polymorphism is an allele at a SNP selected from the group consisting of: a cytosine at position rs1375388, an adenine at rs1448972, a guanine at rs 6844155, a cytosine at rs4960288, an adenine at rs 12056034, a thymine at rs 17145732, a cytosine at rs 3812316, an adenine at rs799160, a thymidine at rs325, an adenine at rd326, a cytosine at rs328, a cytosine at rs17410914, a thymidine at rs4406409, a cytosine at rs1558861, a guanine at rs2075292, an adenine at rs7124741, an adenine at rs17120139, a cytosine at rs9508032, a cytosine at rs9513115, a cytosine at rs9895521, a cytosine at rs747398, an adenine at rs4824743. Alternatively, or in addition, the polymorphism may be wherein the polymorphism is in the vicinity of the APOA1-APOA3-APOA4-APOA5 cluster. Thus, the polymorphism may be at or proximal to a gene listed in Table 18. In a particular embodiment, the polymorphism is a single nucleotide polymorphism (SNP) in the LPL gene or a gene or a locus closely linked thereto.

[0030] In a further embodiment, the metabolic syndrome phenotype is lower high density lipoprotein levels. In this embodiment, the polymorphism may, for example, be an ellele at a single nucleotide polymorphism (SNP) selected from the group consisting of: a thymidine at rs2992753, an adenine at rs2819770, a thymine at rs 17145732, a thymine at rs325, an adenine at rs326, a cytosine at rs328, a thymine at rs9282541, a guanine at rs11858164, a thymine at rs2217332, a guanine at rs711752, a guanine at rs7205804, a cytosine at rs5880, an adenine at rs5882, an adenine at rs1800777, and an adenine at rs4824743.

[0031] In a still further embodiment, the metabolic syndrome phenotype is altered blood pressure, such as high blood pressure. In this embodiment, the polymorphism may, for example, be a guanine at rs5174.

[0032] In yet another embodiment, the metabolic syndrome phenotype is susceptibility to metabolic syndrome, when the polymorphism may, for example, be a guanine at rs1354746 or a guanine at rs7205804.

[0033] In another aspect, the invention concerns a method of identifying a modulator of a metabolic syndrome phenotype, the method comprising administering a modulator of a gene or gene product, wherein the gene or gene product is encoded by a gene or locus listed in Tables 1-14, 17 or 18 to a non-human mammal or ex vivo mammalian cell, and measuring an effect indicative of a metabolic syndrome phenotype.

[0034] In a further aspect, the invention concerns method of identifying a metabolic syndrome phenotype for an organism, the method comprising:

[0035] detecting, in a biological sample from the organism, a haplotype in a genomic region comprising an allele selected from the alleles listed in Tables 1-14, 17 or 18; and

[0036] correlating the haplotype to the metabolic syndrome phenotype, thereby identifying the metabolic syndrome phenotype.

[0037] In a still further aspect, the invention concerns a method for identifying a human subject at increased risk for a metabolic syndrome phenotype, comprising using an in vitro assay to detect the presence of a risk allele provided in Table 18 in a human subject that is more frequently present in a population of humans with the metabolic syndrome phenotype than in a population of humans that do not have the metabolic syndrome phenotype, wherein the presence of the risk allele indicates that the human subject has an increased risk for the metabolic syndrome phenotype.

[0038] In another aspect, the invention concerns a method for identifying a human subject at increased risk for coronary heart disease, comprising using an in vitro assay to detect the presence of a polymorphism with a linkage disequilibrium of at least r²=0.8 with a risk allele provided in Table 18 in a human subject, wherein the presence of the polymorphism indicates that the human subject has an increased risk for coronary heart disease.

[0039] In yet another aspect, the invention concerns a method for determining whether a human subject is at increased risk for a metabolic syndrome phenotype, comprising using an in vitro assay to detect the presence of a haplotype comprising a risk allele provided in Table 18 in a human subject, wherein the presence of the haplotype indicates that the human subject has an increased risk for the metabolic syndrome phenotype.

[0040] In an additional aspect, the invention concerns a method for identifying a human subject at increased risk for a metabolic syndrome phenotype, comprising using an in vitro assay to detect the genotype of a SNP provided in Table 18, wherein the genotype of the SNP indicates that the human subject has an increased risk for the metabolic syndrome phenotype.

[0041] The invention further provides a kit comprising one or more components for detecting the presence of a risk allele provided in Table 18 in a human subject.

[0042] It will be appreciated that the methods, systems and kits above can all be used together in various combinations and that features of the methods can be reflected in the systems and kits, and vice-versa.

### BRIEF DESCRIPTION OF THE DRAWINGS

[0043] The file of this patent contains at least one drawing executed in color. Copies of this patent with color drawing(s) will be provided by the Patent and Trademark Office upon request and payment of the necessary fees.

[0044] FIG. 1. Principal components analysis of Phase II data. Results are shown for samples projected onto the top two principal components, colored by reported ancestry. The scaling of the two axes is essentially arbitrary. The shape of the Mexican cluster is consistent with PC1 quantifying a sample's European ancestry in this admixed population.

[0045] FIG. 2. Genomic context of the MLXIPL (earlier known as WBSCR14) region on chromosome 7q11.23. The lower panel shows pairwise linkage disequilibrium between SNPs with MAF≧0.05 in the Phase II HapMap (release 21a) CEU panel, using Haploview's standard color scheme. The four tested SNPs all have D′>0.9 with the most-associated SNP, rs12316, in the stage 2 data. Association test scores are shown as −log₁₀(P), where P is from Table 18.

### DETAILED DESCRIPTION OF THE INVENTION

[0046] The present invention provides correlations between polymorphisms in or proximal to the genes listed in Tables 1-14 and one or more metabolic syndrome phenotypes. Thus, detection of particular polymorphisms in these loci or genes, or their encoded gene products, provides methods for identifying patients that have or are at risk for one or more metabolic syndrome phenotypes, including presence of or predisposition to metabolic syndrome, obesity, insulin resistance, high blood pressure, diabetes, myocardial infarction, and dyslipidemia. Systems for detecting and correlating alleles to metabolic syndrome phenotypes, e.g., for practicing the methods, are also a feature of the invention. In addition, the identification of these polymorphisms provides high-throughput systems and methods for identifying modulators of metabolic syndrome phenotypes.

[0047] The following definitions are provided to more clearly identify aspects of the present invention. They should not be imputed to any other related or unrelated application or patent.

### DEFINITIONS

[0048] It is to be understood that this invention is not limited to particular embodiments, which can, of course, vary. It is also to be understood that the terminology used herein is for the purpose of describing particular embodiments only, and is not intended to be limiting. As used in this specification and the appended claims, terms in the singular and the singular forms “a,” “an” and “the,” for example, optionally include plural referents unless the content clearly dictates otherwise. Thus, for example, reference to “a probe” optionally includes a plurality of probe molecules; similarly, depending on the context, use of the term “a nucleic acid” optionally includes, as a practical matter, many copies of that nucleic acid molecule. Letter designations for genes or proteins can refer to the gene form and/or the protein form, depending on context. One of skill is fully able to relate the nucleic acid and amino acid forms of the relevant biological molecules by reference to the sequences herein, known sequences and the genetic code.

[0049] In the following description, various phases of a case study are referred to as “Phase” or “stage,” which terms are used interchangeably.

[0050] Unless otherwise indicated, nucleic acids are written left to right in a 5′ to 3′ orientation. Numeric ranges recited within the specification are inclusive of the numbers defining the range and include each integer or any non-integer fraction within the defined range. Unless defined otherwise, all technical and scientific terms used herein have the same meaning as commonly understood by one of ordinary skill in the art to which the invention pertains. Although any methods and materials similar or equivalent to those described herein can be used in the practice for testing of the present invention, the preferred materials and methods are described herein. In describing and claiming the present invention, the following terminology will be used in accordance with the definitions set out below.

[0051] A “phenotype” is a trait or collection of traits that is/are observable in an individual or population. The trait can be quantitative (a quantitative trait, or QTL) or qualitative.

[0052] A “metabolic syndrome phenotype” is a phenotype that displays a predisposition towards developing metabolic syndrome in an individual (e.g., a risk factor for metabolic syndrome), or that displays metabolic syndrome in the individual, or that is a phenotype clinically associated with metabolic syndrome (e.g., obesity, dyslipidemia, and high blood pressure). A phenotype that displays a predisposition for metabolic syndrome, can for example, show a higher likelihood that the syndrome will develop in an individual with the phenotype than in members of the general population under a given set of environmental conditions, such as a high calorie, e.g., high-fat, and/or high-carbohydrate diet, and/or a low physical activity regime. Metabolic syndrome can be characterized by any of a number of metabolic disorders or risk factors, generally considered to most typify metabolic syndrome when more than one of these factors are present in a single individual. The factors include: obesity (in particular, central obesity, which is characterized by disproportionate fat tissue in and around the abdomen); high BMI (body mass index); large waist circumference; hypertension; atherogenic dyslipidemia (these include a family of blood fat disorders including, e.g., high triglycerides and low HDL cholesterol, that can foster plaque buildups in the vascular system, including artery walls); high blood pressure (e.g., 130/85 mm Hg or higher); diabetes, abnormal insulin levels, insulin resistance or glucose intolerance (the body can't properly use insulin or blood sugar); susceptibility to myocardial infarction; a chronic prothrombotic state (e.g., characterized by high fibrinogen or plasminogen activator inhibitor [−1] levels in the blood); and a chronic proinflammatory state (e.g., characterized by higher than normal levels of high-sensitivity C-reactive protein in the blood).

[0053] Insulin resistance occurs when the body doesn't respond as well to the insulin that the pancreas is making and glucose is less able to enter the cells. People with insulin resistance may or may not go on to develop type 2 diabetes. Any of a variety of tests in current use can be used to determine insulin resistance, including: the Oral Glucose Tolerance Test (OGTT), Fasting Blood Glucose (FBG), Normal Glucose Tolerance (NGT), Impaired Glucose Tolerance (IGT), Impaired Fasting Glucose (IFG), Homeostasis Model Assessment (HOMA), the Quantitative Insulin Sensitivity Check Index (QUICKI) and the Intravenous Insulin Tolerance Test (IVITT). See also, www.retroconference.org/2002/Posters/12814.pdf; De Vegt (1998) “The 1997 American Diabetes Association criteria versus the 1985 World Health Organization criteria for the diagnosis of abnormal glucose tolerance: poor agreement in the Hoorn Study.” Diab Care 1998, 21:1686-1690; Matthews (1985) “Homeostasis model assessment: insulin resistance and B-cell function from fasting plasma glucose and insulin concentrations in man.” Diabetologia 28:412-419; Katz, A (2000) “Quantitative Insulin Sensitivity Check Index: A Simple, Accurate Method for Assessing Insulin Sensitivity In Humans.” JCE & M 85:2402-2410.

[0054] A “polymorphism” is a locus that is variable; that is, within a population, the nucleotide sequence at a polymorphism has more than one version or allele. The term “allele” refers to one of two or more different nucleotide sequences that occur or are encoded at a specific locus, or two or more different polypeptide sequences encoded by such a locus. For example, a first allele can occur on one chromosome, while a second allele occurs on a second homologous chromosome, e.g., as occurs for different chromosomes of a heterozygous individual, or between different homozygous or heterozygous individuals in a population. One example of a polymorphism is a “single nucleotide polymorphism” (SNP), which is a polymorphism at a single nucleotide position in a genome (the nucleotide at the specified position varies between individuals or populations).

[0055] An allele “positively” correlates with a trait when it is linked to it and when presence of the allele is an indictor that the trait or trait form will occur in an individual comprising the allele. An allele negatively correlates with a trait when it is linked to it and when presence of the allele is an indicator that a trait or trait form will not occur in an individual comprising the allele.

[0056] A marker polymorphism or allele is “correlated” with a specified phenotype (metabolic syndrome, obesity predisposition, insulin resistance, etc.) when it can be statistically linked (positively or negatively) to the phenotype. This correlation is often inferred as being causal in nature, but it need not be simple genetic linkage to (association with) a locus for a trait that underlies the phenotype is sufficient. Such an allele may be “protective” and reduce an individual's likelihood of developing a metabolic syndrome phenotype, or may increase an individual's susceptibility or predisposition to developing a metabolic syndrome phenotype.

[0057] A “favorable allele” is an allele at a particular locus that positively correlates with a desirable phenotype, e.g., resistance to obesity, or resistance to metabolic syndrome, or that negatively correlates with an undesirable phenotype, e.g., an allele that negatively correlates with obesity predisposition or predisposition to metabolic syndrome. The desired phenotype can, of course, vary, e.g., in some animal breeding contexts, predisposition to obesity can be desirable, instead of undesirable, as it is in many human populations. A favorable allele of a linked marker is a marker allele that segregates with the favorable allele. A favorable allelic form of a chromosome segment is a chromosome segment that includes a nucleotide sequence that positively correlates with the desired phenotype, or that negatively correlates with the unfavorable phenotype at one or more genetic loci physically located on the chromosome segment.

[0058] An “unfavorable allele” is an allele at a particular locus that negatively correlates with a desirable phenotype, or that correlates positively with an undesirable phenotype, e.g., positive correlation to obesity predisposition, or metabolic syndrome predisposition, or negative correlation with obesity resistance or resistance to metabolic syndrome. Here again, the desired phenotype can, of course, vary, e.g., in some animal breeding contexts, predisposition to obesity can be desirable, instead of undesirable, as it is in many human populations. An unfavorable allele of a linked marker is a marker allele that segregates with the unfavorable allele. An unfavorable allelic form of a chromosome segment is a chromosome segment that includes a nucleotide sequence that negatively correlates with the desired phenotype, or positively correlates with the undesirable phenotype at one or more genetic loci physically located on the chromosome segment.

[0059] “Allele frequency” refers to the frequency (proportion or percentage) at which an allele is present at a locus within an individual, within a line, or within a population of lines. For example, for an allele “A,” diploid individuals of genotype “AA,” “Aa,” or “aa” have allele frequencies of 1.0, 0.5, or 0.0, respectively. One can estimate the allele frequency within a line or population by averaging the allele frequencies of a sample of individuals from that line or population. Similarly, one can calculate the allele frequency within a population of lines by averaging the allele frequencies of lines that make up the population.

[0060] An individual is “homozygous” if the individual has only one type of allele at a given locus (e.g., a diploid individual has a copy of the same allele at a locus for each of two homologous chromosomes). An individual is “heterozygous” if more than one allele type is present at a given locus (e.g., a diploid individual with one copy each of two different alleles). The term “homogeneity” indicates that members of a group have the same genotype at one or more specific loci. In contrast, the term “heterogeneity” is used to indicate that individuals within the group differ in genotype at one or more specific loci.

[0061] A “locus” is a chromosomal position or region. For example, a polymorphic locus is a position or region where a polymorphic nucleic acid, trait determinant, gene or marker is located. In a further example, a “gene locus” is a specific chromosome location in the genome of a species where a specific gene can be found. Similarly, the term “quantitative trait locus” or “QTL” refers to a locus with at least two alleles that differentially affect the expression or alter the variation of a quantitative or continuous phenotypic trait in at least one genetic background, e.g., in at least one breeding population or progeny.

[0062] A “marker,” “molecular marker” or “marker nucleic acid” refers to a nucleotide sequence or encoded product thereof (e.g., a protein) used as a point of reference when identifying a locus or a linked locus. A marker can be derived from genomic nucleotide sequence or from expressed nucleotide sequences (e.g., from an RNA, a cDNA, etc.), or from an encoded polypeptide. The term also refers to nucleic acid sequences complementary to or flanking the marker sequences, such as nucleic acids used as probes or primer pairs capable of amplifying the marker sequence. A “marker probe” is a nucleic acid sequence or molecule that can be used to identify the presence of a marker locus, e.g., a nucleic acid probe that is complementary to a marker locus sequence. Nucleic acids are “complementary” when they specifically hybridize in solution, e.g., according to Watson-Crick base pairing rules. A “marker locus” is a locus that can be used to track the presence of a second linked locus, e.g., a linked or correlated locus that encodes or contributes to the population variation of a phenotypic trait. For example, a marker locus can be used to monitor segregation of alleles at a locus, such as a QTL, that are genetically or physically linked to the marker locus. Thus, a “marker allele,” or, alternatively, an “allele of a marker locus” is one of a plurality of polymorphic nucleotide sequences found at a marker locus in a population that is polymorphic for the marker locus. In one aspect, the present invention provides marker loci correlating with a phenotype of interest, e.g., one or more metabolic syndrome phenotypes. Each of the identified markers is expected to be in close or overlapping physical and genetic proximity (resulting in physical and/or genetic linkage) to a genetic element, e.g., a QTL, that contributes to the relevant phenotype. Markers corresponding to genetic polymorphisms between members of a population can be detected by methods well-established in the art. These include, e.g., PCR-based sequence specific amplification methods, detection of restriction fragment length polymorphisms (RFLP), detection of isozyme markers, detection of allele specific hybridization (ASH), detection of single nucleotide extension, detection of amplified variable sequences of the genome, detection of self-sustained sequence replication, detection of simple sequence repeats (SSRs), detection of single nucleotide polymorphisms (SNPs), or detection of amplified fragment length polymorphisms (AFLPs).

[0063] A “genetic map” is a description of genetic linkage (or association) relationships among loci on one or more chromosomes (or linkage groups) within a given species, generally depicted in a diagrammatic or tabular form. “Mapping” is the process of defining the linkage relationships of loci through the use of genetic markers, populations segregating for the markers, and standard genetic principles of recombination frequency. A “map location” is an assigned location on a genetic map relative to linked genetic markers where a specified marker can be found within a given species. The term “chromosome segment” or designates a contiguous linear span of genomic DNA that resides on a single chromosome. Similarly, a “haplotype” is a set of genetic loci found in the heritable material of an individual or population (the set can be a contiguous or non-contiguous). In the context of the present invention genetic elements such as one or more alleles herein and one or more linked marker alleles can be located within a chromosome segment and are also, accordingly, genetically linked, a specified genetic recombination distance of less than or equal to 20 centimorgan (cM) or less, e.g., 15 cM or less, often 10 cM or less, e.g., about 9, 8, 7, 6, 5, 4, 3, 2, 1, 0.75, 0.5, 0.25, or 0.1 CM or less. That is, two closely linked genetic elements within a single chromosome segment undergo recombination during meiosis with each other at a frequency of less than or equal to about 20%, e.g., about 19%, 18%, 17%, 16%, 15%, 14%, 13%, 12%, 11%, 10%, 9%, 8%, 7%, 6%, 5%, 4%, 3%, 2%, 1%, 0.75%, 0.5%, 0.25%, or 0.1% or less.

[0064] A “genetic recombination frequency” is the frequency of a recombination event between two genetic loci. Recombination frequency can be observed by following the segregation of markers and/or traits during meiosis. In the context of this invention, a marker locus is “associated with” another marker locus or some other locus (for example, an obesity or metabolic syndrome locus), when the relevant loci are part of the same linkage group due to association and are in linkage disequilibrium. This occurs when the marker locus and a linked locus are found together in progeny more frequently than if the loci segregate randomly. Similarly, a marker locus can also be associated with a trait, e.g., a marker locus can be “associated with” a given trait when the marker locus is in linkage disequilibrium with the trait. The term “linkage disequilibrium” refers to a non-random segregation of genetic loci or traits (or both). In either case, linkage disequilibrium implies that the relevant loci are within sufficient physical proximity along a length of a chromosome so that they segregate together with greater than random frequency (in the case of co-segregating traits, the loci that underlie the traits are in sufficient proximity to each other). Linked loci co-segregate more than 50% of the time, e.g., from about 51% to about 100% of the time. Advantageously, the two loci are located in close proximity such that recombination between homologous chromosome pairs does not occur between the two loci during meiosis with high frequency, e.g., such that closely linked loci co-segregate at least about 80% of the time, more preferably at least about 85% of the time, still more preferably at least 90% of the time, e.g., 91%, 92%, 93%, 94%, 95%, 96%, 97%, 98%, 99%, 99.5%, 99.75%, or 99.90% or more of the time.

[0065] In some embodiments, a polymorphism with a linkage disequilibrium of at least r²=0.89, 0.90, 0.91, 0.92, 0.93, 0.94, 0.95, 0.96, 0.97, 0.98 or 0.99 with a polymorphism associated with a metabolic syndrome phenotype (such as those provided in the tables herein) in a human subject is detected. Techniques for determining whether a polymorphism is in linkage disequilibrium with a risk allele are well-known to the one of skill in the art. See, e.g., the following for information concerning linkage disequilibrium in the human genome: Wall et al., “Haplotype blocks and linkage disequilibrium in the human genome”, Nat Rev Genet. 2003 August; 4(8):587-97; Garner et al., “On selecting markers for association studies: patterns of linkage disequilibrium between two and three diallelic loci”, Genet Epidemiol. 2003 January; 24(1):57-67; Ardlie et al., “Patterns of linkage disequilibrium in the human genome”, Nat Rev Genet. 2002 April; 3(4):299-309 (erratum in Nat Rev Genet 2002 July; 3(7):566); and Remm et al., “High-density genotyping and linkage disequilibrium in the human genome using chromosome 22 as a model”; Curr Opin Chem Biol. 2002 February; 6(1):24-30; Haldane J B S (1919) The combination of linkage values, and the calculation of distances between the loci of linked factors. J Genet 8:299-309; Mendel, G. (1866) Versuche uber Pflanzen-Hybriden. Verhandlungen des naturforschenden Vereines in Brunn [Proceedings of the Natural History Society of Brunn]; Lewin B (1990) Genes IV Oxford University Press, New York, USA; Hartl D L and Clark A G (1989) Principles of Population Genetics 2.sup.nd ed. Sinauer Associates, Inc. Sunderland, Mass., USA; Gillespie J H (2004) Population Genetics: A Concise Guide. 2.sup.nd ed. Johns Hopkins University Press. USA; Lewontin R C (1964) The interaction of selection and linkage. I. General considerations; heterotic models. Genetics 49:49-67; Hoel P G (1954) Introduction to Mathematical Statistics 2.sup.nd ed. John Wiley & Sons, Inc. New York, USA; Hudson R R (2001) Two-locus sampling distributions and their application. Genetics 159:1805-1817; Dempster A P, Laird N M, Rubin D B (1977) Maximum likelihood from incomplete data via the EM algorithm. J R Stat Soc 39:1-38; Excoffier L, Slatkin M (1995) Maximum-likelihood estimation of molecular haplotype frequencies in a diploid population. Mol Biol Evol 12(5):921-927; Tregouet D A, Escolano S, Tiret L, Mallet A, Golmard J L (2004) A new algorithm for haplotype-based association analysis: the Stochastic-EM algorithm. Ann Hum Genet 68(Pt 2):165-177; Long A D and Langley C H (1999) The power of association studies to detect the contribution of candidate genetic loci to variation in complex traits. Genome Research 9:720-731; Agresti A (1990) Categorical Data Analysis. John Wiley & Sons, Inc. New York, USA; Lange K (1997) Mathematical and Statistical Methods for Genetic Analysis. Springer-Verlag New York, Inc. New York, USA; The International HapMap Consortium (2003) The International HapMap Project. Nature 426:789-796; The International HapMap Consortium (2005) A haplotype map of the human genome. Nature 437:1299-1320; Thorisson G A, Smith A V, Krishnan L, Stein L D (2005), The International HapMap Project Web Site. Genome Research 15:1591-1593; McVean G, Spencer C C A, Chaix R (2005) Perspectives on human genetic variation from the HapMap project. PLoS Genetics 1(4):413-418; Hirschhorn J N, Daly M J (2005) Genome-wide association studies for common diseases and complex traits. Nat Genet 6:95-108; Schrodi S J (2005) A probabilistic approach to large-scale association scans: a semi-Bayesian method to detect disease-predisposing alleles. SAGMB 4(1):3 1; Wang W Y S, Barratt B J, Clayton D G, Todd J A (2005) Genome-wide association studies: theoretical and practical concerns. Nat Rev Genet 6:109-118. Pritchard J K, Przeworski M (2001) Linkage disequilibrium in humans: models and data. Am J Hum Genet 69:1-14. The parameter r² is commonly used in the genetics art to characterize the extent of linkage disqulibirium between two genetic loci (see, e.g., Hudson et al. (2001) Genetics 159:1805-1817).

[0066] The phrase “closely linked,” in the present application, means that recombination between two linked loci (e.g., a SNP such as one identified in Tables 1-14 herein and a second linked allele) occurs with a frequency of equal to or less than about 20%. Put another way, the closely (or “tightly”) linked loci co-segregate at least 80% of the time. Marker loci are especially useful in the present invention when they are closely linked to target loci (e.g., QTL for metabolic syndrome, obesity predisposition, and/or insulin resistance, or, alternatively, simply other marker loci). The more closely a marker is linked to a target locus, the better an indicator for the target locus that the marker is. Thus, in one embodiment, tightly linked loci such as a marker locus and a second locus display an inter-locus recombination frequency of about 20% or less, e.g., 15% or less, e.g., 10% or less, preferably about 9% or less, still more preferably about 8% or less, yet more preferably about 7% or less, still more preferably about 6% or less, yet more preferably about 5% or less, still more preferably about 4% or less, yet more preferably about 3% or less, and still more preferably about 2% or less. In highly preferred embodiments, the relevant loci (e.g., a marker locus and a target locus such as a QTL) display a recombination frequency of about 1% or less, e.g., about 0.75% or less, more preferably about 0.5% or less, or yet more preferably about 0.25% or less, or still more preferably about 0.1% or less. Two loci that are localized to the same chromosome, and at such a distance that recombination between the two loci occurs at a frequency of less than about 20%, e.g., 15%, more preferably 10% (e.g., about 9%, 8%, 7%, 6%, 5%, 4%, 3%, 2%, 1%, 0.75%, 0.5%, 0.25%, 0.1% or less) are also said to be “proximal to” each other. When referring to the relationship between two linked genetic elements, such as a genetic element contributing to a trait and a proximal marker, “coupling” phase linkage indicates the state where the “favorable” allele at the trait locus is physically associated on the same chromosome strand as the “favorable” allele of the respective linked marker locus. In coupling phase, both favorable alleles are inherited together by progeny that inherit that chromosome strand. In “repulsion” phase linkage, the “favorable” allele at the locus of interest (e.g., a QTL for obesity or metabolic syndrome) is physically associated on the same chromosome strand as an “unfavorable” allele at the proximal marker locus, and the two “favorable” alleles are not inherited together (i.e., the two loci are “out of phase” with each other).

[0067] The term “amplifying” in the context of nucleic acid amplification is any process whereby additional copies of a selected nucleic acid (or a transcribed form thereof) are produced. Typical amplification methods include various polymerase based replication methods, including the polymerase chain reaction (PCR), ligase mediated methods such as the ligase chain reaction (LCR) and RNA polymerase based amplification (e.g., by transcription) methods. An “amplicon” is an amplified nucleic acid, e.g., a nucleic acid that is produced by amplifying a template nucleic acid by any available amplification method (e.g., PCR, LCR, transcription, or the like).

[0068] A “genomic nucleic acid” is a nucleic acid that corresponds in sequence to a heritable nucleic acid in a cell. Common examples include nuclear genomic DNA and amplicons thereof. A genomic nucleic acid is, in some cases, different from a spliced RNA, or a corresponding cDNA, in that the spliced RNA or cDNA is processed, e.g., by the splicing machinery, to remove introns. Genomic nucleic acids optionally comprise non-transcribed (e.g., chromosome structural sequences, promoter regions, enhancer regions, etc.) and/or non-translated sequences (e.g., introns), whereas spliced RNA/cDNA typically do not have non-transcribed sequences or introns. A “template genomic nucleic acid” is a genomic nucleic acid that serves as a template in an amplification reaction (e.g., a polymerase based amplification reaction such as PCR, a ligase mediated amplification reaction such as LCR, a transcription reaction, or the like).

[0069] An “exogenous nucleic acid” is a nucleic acid that is not native to a specified system (e.g., a germplasm, cell, individual, etc.), with respect to sequence, genomic position, or both. As used herein, the terms “exogenous” or “heterologous” as applied to polynucleotides or polypeptides typically refers to molecules that have been artificially supplied to a biological system (e.g., a cell, an individual, etc.) and are not native to that particular biological system. The terms can indicate that the relevant material originated from a source other than a naturally occurring source, or can refer to molecules having a non-natural configuration, genetic location or arrangement of parts.

[0070] The term “introduced” when referring to translocating a heterologous or exogenous nucleic acid into a cell refers to the incorporation of the nucleic acid into the cell using any methodology. The term encompasses such nucleic acid introduction methods as “transfection,” “transformation” and “transduction.”

[0071] As used herein, the term “vector” is used in reference to polynucleotides or other molecules that transfer nucleic acid segment(s) into a cell. The term “vehicle” is sometimes used interchangeably with “vector.” A vector optionally comprises parts which mediate vector maintenance and enable its intended use (e.g., sequences necessary for replication, genes imparting drug or antibiotic resistance, a multiple cloning site, operably linked promoter/enhancer elements which enable the expression of a cloned gene, etc.). Vectors are often derived from plasmids, bacteriophages, or plant or animal viruses. A “cloning vector” or “shuttle vector” or “subcloning vector” contains operably linked parts that facilitate subcloning steps (e.g., a multiple cloning site containing multiple restriction endonuclease sites).

[0072] The term “expression vector” as used herein refers to a vector comprising operably linked polynucleotide sequences that facilitate expression of a coding sequence in a particular host organism (e.g., a bacterial expression vector or a mammalian cell expression vector). Polynucleotide sequences that facilitate expression in prokaryotes typically include, e.g., a promoter, an operator (optional), and a ribosome binding site, often along with other sequences. Eukaryotic cells can use promoters, enhancers, termination and polyadenylation signals and other sequences that are generally different from those used by prokaryotes.

[0073] A specified nucleic acid is “derived from” a given nucleic acid when it is constructed using the given nucleic acid's sequence, or when the specified nucleic acid is constructed using the given nucleic acid.

[0074] A “gene” is one or more sequence(s) of nucleotides in a genome that together encode one or more expressed molecule, e.g., an RNA, or polypeptide. The gene can include coding sequences that are transcribed into RNA which may then be translated into a polypeptide sequence, and can include associated structural or regulatory sequences that aid in replication or expression of the gene. Genes of interest in the present invention include any gene or gene product listed in Tables 1-14.

[0075] A “genotype” is the genetic constitution of an individual (or group of individuals) at one or more genetic loci. Genotype is defined by the allele(s) of one or more known loci of the individual, typically, the compilation of alleles inherited from its parents. A “haplotype” is the genotype of an individual at a plurality of genetic loci on a single DNA strand. Typically, the genetic loci described by a haplotype are physically and genetically linked, i.e., on the same chromosome strand.

[0076] A “set” of markers or probes refers to a collection or group of markers or probes, or the data derived therefrom, used for a common purpose, e.g., identifying an individual with a specified phenotype (e.g., a metabolic syndrome phenotype, including metabolic syndrome, insulin resistance, obesity, high blood pressure, dyslipidemia, diabetes, myocardial infarction, etc.). Frequently, data corresponding to the markers or probes, or derived from their use, is stored in an electronic medium. While each of the members of a set possess utility with respect to the specified purpose, individual markers selected from the set as well as subsets including some, but not all of the markers, are also effective in achieving the specified purpose.

[0077] A “look up table” is a table that correlates one form of data to another, or one or more forms of data with a predicted outcome to which the data is relevant. For example, a look up table can include a correlation between allele data and a predicted trait that an individual comprising one or more given alleles is likely to display. These tables can be, and typically are, multidimensional, e.g., taking multiple alleles into account simultaneously, and, optionally, taking other factors into account as well, such as genetic background, e.g., in making a trait prediction.

[0078] A “computer readable medium” is an information storage media that can be accessed by a computer using an available or custom interface. Examples include memory (e.g., ROM or RAM, flash memory, etc.), optical storage media (e.g., CD-ROM), magnetic storage media (computer hard drives, floppy disks, etc.), punch cards, and many others that are commercially available. Information can be transmitted between a system of interest and the computer, or to or from the computer or to or from the computer readable medium for storage or access of stored information. This transmission can be an electrical transmission, or can be made by other available methods, such as an IR link, a wireless connection, or the like.

[0079] “System instructions” are instruction sets that can be partially or fully executed by the system. Typically, the instruction sets are present as system software.

[0080] A “translation product” is a product (typically a polypeptide) produced as a result of the translation of a nucleic acid. A “transcription product” is a product (e.g., an RNA, such as an mRNA, a catalytic or biologically active RNA, or the like) produced as a result of transcription of a nucleic acid (e.g., a DNA).

[0081] An “array” is an assemblage of elements. The assemblage can be spatially ordered (a “patterned array”) or disordered (a “randomly patterned” array). The array can form or comprise one or more functional elements (e.g., a probe region on a microarray) or it can be non-functional.

[0082] As used herein, the term “SNP” or “single nucleotide polymorphism” refers to a genetic variation between individuals; e.g., a single nitrogenous base position in the DNA of organisms that is variable. As used herein, “SNPs” is the plural of SNP. Of course, when one refers to DNA herein, such reference may include derivatives of the DNA such as amplicons, RNA transcripts thereof, etc.

[0083] The term “genomic inflation factor” or “inflation factor” refers to a comparison of unassociated genetic markers with those of control subjects for potential differences in allele frequency related to imperfect matching between case subjects and control.

[0084] The term “nonsynonymous SNP” is used to refer to a SNP that leads to a change in the amino acid sequence of the gene's resulting protein and that may therefore affect the three-dimensional structure and its function.

[0085] Overview

[0086] The invention includes new correlations between the genes, products or loci of Tables 1-14, 17 and 18 and a variety of metabolic syndrome phenotypes, including presence of or predisposition to metabolic syndrome, obesity, insulin resistance, high blood pressure, dyslipidemia, diabetes, and myocardial infarction. Certain alleles in, and linked to, these genes or gene products are predictive of the likelihood that an individual possessing the relevant alleles will develop one or more of these disorders. Accordingly, detection of these alleles, by any available method, can be used for diagnostic purposes such as early detection of susceptibility to a metabolic syndrome phenotype, prognosis for patients that present with the metabolic syndrome phenotype, and in assisting diagnosis, e.g., where current criteria are insufficient for a definitive diagnosis. In addition, because fat production in livestock is important to livestock breeders, it is possible to perform marker assisted selection (MAS) on livestock and livestock germplasm using such allele correlations to select for or against metabolic syndrome phenotypes, e.g., obesity.

[0087] The identification that the genes or gene products of Tables 1-14, 17 and 18 are correlated to the metabolic syndrome phenotypes noted above also provides a platform for screening potential modulators of metabolic syndrome phenotypes. Modulators of the activity of any of these genes or their encoded proteins are expected to have an effect on metabolic syndrome, obesity, insulin resistance, high blood pressure, dyslipidemia, diabetes, and risk of myocardial infarction. Thus, methods of screening, systems for screening and the like, are features of the invention. Modulators identified by these screening approaches are also a feature of the invention.

[0088] Kits for the diagnosis and treatment of metabolic syndrome, obesity, insulin resistance, high blood pressure, dyslipidemia, diabetes, and risk of myocardial infarction, e.g., comprising probes to identify relevant alleles, packaging materials, and instructions for correlating detection of relevant alleles to metabolic syndrome phenotypes are also a feature of the invention. These kits can also include modulators of the relevant disease and/or instructions for treating patients using conventional methods.

[0089] Methods of Identifying Metabolic Syndrome Phenotypes

[0090] As noted, the invention provides the discovery that certain genes or other loci of Tables 1-14 are linked to metabolic syndrome phenotypes. Thus, by detecting markers (e.g., the SNPs in Tables 1-14, 17 and 18 or loci closely linked thereto) that correlate, positively or negatively, with the metabolic syndrome phenotypes, it can be determined whether an individual or population is likely to be susceptible to these phenotypes. This provides enhanced early detection options to identify patients that are likely to eventually suffer from these phenotypes, making it possible, in some cases, to prevent actual development of metabolic syndrome phenotypes by taking early preventative action (e.g., any existing therapy such as diet, exercise, available medications, etc.). In addition, use of the various markers herein also adds certainty to existing diagnostic techniques for identifying whether a patient is suffering from, e.g., metabolic syndrome, which can be somewhat ambiguous using previous methods, e.g., as discussed in the Background of the Invention, above. Furthermore, knowledge of whether there is a molecular basis for metabolic syndrome phenotypes can also assist in determining patient prognosis, e.g., by providing an indication of how likely it is that a patient can respond to conventional therapy for the relevant disorder, or whether more serious options such as gastric surgery are likely to be necessary. Disease treatment can also be targeted based on what type of molecular disorder the patient displays.

[0091] In non-human subjects (e.g., non-human mammals such as livestock), it is also possible to use this information both for disease diagnosis and prevention (e.g., treatment of pets such as dogs and cats, etc.) as in humans. In addition, it is possible to perform marker-assisted animal breeding to enhance either fat production or lean meat production, depending on what is desired. In brief, livestock animals or germplasm can be selected for marker alleles that positively or negatively correlate with one or more metabolic syndrome phenotypes without actually raising the livestock and measuring for the desired trait. Marker assisted selection (MAS) is a powerful shortcut to selecting for desired phenotypes and for introgressing desired traits into livestock herds (e.g., introgressing desired traits into elite herd populations). MAS is easily adapted to high throughput molecular analysis methods that can quickly screen genetic material for the markers of interest, and is much more cost effective than raising and observing livestock for visible traits.

[0092] Detection methods for detecting relevant alleles can include any available method, e.g., amplification technologies. For example, detection can include amplifying the polymorphism or a sequence associated therewith and detecting the resulting amplicon. This can include admixing an amplification primer or amplification primer pair with a nucleic acid template isolated from the organism or biological sample (e.g., comprising the SNP or other polymorphism), e.g., where the primer or primer pair is complementary or partially complementary to at least a portion of the gene or tightly linked polymorphism, or to a sequence proximal thereto. The primer is typically capable of initiating nucleic acid polymerization by a polymerase on the nucleic acid template. The primer or primer pair is extended, e.g., in a DNA polymerization reaction (PCR, RT-PCR, etc.) comprising a polymerase and the template nucleic acid to generate the amplicon. The amplicon is detected by any available detection process, e.g., sequencing, hybridizing the amplicon to an array (or affixing the amplicon to an array and hybridizing probes to it), digesting the amplicon with a restriction enzyme (e.g., RFLP), real-time PCR analysis, single nucleotide extension, allele-specific hybridization, or the like.

[0093] The correlation between a detected polymorphism and a trait can be performed by any method that can identify a relationship between an allele and a phenotype. Most typically, these methods involve referencing a look up table that comprises correlations between alleles of the polymorphism and the phenotype. The table can include data for multiple allele-phenotype relationships and can take account of additive or other higher order effects of multiple allele-phenotype relationships, e.g., through the use of statistical tools such as principle component analysis, heuristic algorithms, etc.

[0094] Within the context of these methods, the following discussion first focuses on how markers and alleles are linked and how this phenomenon can be used in the context of methods for diagnosing or prognosticating metabolic syndrome phenotypes and then focuses on marker detection methods. Additional sections below discuss data analysis.

[0095] Markers, Linkage and Alleles

[0096] In traditional linkage (or association) analysis, no direct knowledge of the physical relationship of genes on a chromosome is required. Mendel's first law is that factors of pairs of characters are segregated, meaning that alleles of a diploid trait separate into two gametes and then into different offspring. Classical linkage analysis can be thought of as a statistical description of the relative frequencies of cosegregation of different traits. Linkage analysis is the well characterized descriptive framework of how traits are grouped together based upon the frequency with which they segregate together. That is, if two non-allelic traits are inherited together with a greater than random frequency, they are said to be “linked.” The frequency with which the traits are inherited together is the primary measure of how tightly the traits are linked, i.e., traits which are inherited together with a higher frequency are more closely linked than traits which are inherited together with lower (but still above random) frequency. Traits are linked because the genes which underlie the traits reside near one another on the same chromosome. The further apart on a chromosome the genes reside, the less likely they are to segregate together, because homologous chromosomes recombine during meiosis. Thus, the further apart on a chromosome the genes reside, the more likely it is that there will be a recombination event during meiosis that will result in two genes segregating separately into progeny.

[0097] A common measure of linkage (or association) is the frequency with which traits cosegregate. This can be expressed as a percentage of cosegregation (recombination frequency) or, also commonly, in centiMorgans (cM), which are actually a reciprocal unit of recombination frequency. The cM is named after the pioneering geneticist Thomas Hunt Morgan and is a unit of measure of genetic recombination frequency. One cM is equal to a 1% chance that a trait at one genetic locus will be separated from a trait at another locus due to recombination in a single generation (meaning the traits segregate together 99% of the time). Because chromosomal distance is approximately proportional to the frequency of recombination events between traits, there is an approximate physical distance that correlates with recombination frequency. For example, in humans, 1 cM correlates, on average, to about 1 million base pairs (1 Mbp).

[0098] Marker loci are themselves traits and can be assessed according to standard linkage analysis by tracking the marker loci during segregation. Thus, in the context of the present invention, one cM is equal to a 1% chance that a marker locus will be separated from another locus (which can be any other trait, e.g., another marker locus, or another trait locus that encodes a QTL for metabolic syndrome, insulin resistance, obesity, high blood pressure, dyslipidemia, diabetes, myocardial infarction, etc.), due to recombination in a single generation. The markers herein, e.g., those listed in Tables 1-14, can correlate with metabolic syndrome, insulin resistance, obesity, high blood pressure, dyslipidemia, diabetes and/or myocardial infarction. This means that the markers comprise or are sufficiently proximal to a QTL for metabolic syndrome, insulin resistance, obesity, high blood pressure, dyslipidemia, diabetes and/or myocardial infarction that they can be used as a predictor for the trait itself. This is extremely useful in the context of disease diagnosis and, in livestock applications, for marker assisted selection (MAS).

[0099] From the foregoing, it is clear that any marker that is linked to a trait locus of interest (e.g., in the present case, a QTL or identified linked marker locus for a metabolic syndrome phenotype, e.g., as in Tables 1-14, 17 or 18) can be used as a marker for that trait. Thus, in addition to the markers noted in Tables 1-14, 17, and 18, other markers closely linked to the markers itemized in Tables 1-14, 17 and 18 can also usefully predict the presence of the marker alleles indicated in Tables 1-14, 17 and 18 (and, thus, the relevant phenotypic trait). Such linked markers are particularly useful when they are sufficiently proximal to a given locus so that they display a low recombination frequency with the given locus. In the present invention, such closely linked markers are a feature of the invention. Closely linked loci display a recombination frequency with a given marker of about 20% or less (the given marker is within 20 cM of the given marker). Put another way, closely linked loci co-segregate at least 80% of the time. More preferably, the recombination frequency is 10% or less, e.g., 9%, 8%, 7%, 6%, 5%, 4%, 3%, 2%, 1%, 0.5%, 0.25%, or 0.1% or less. In one typical class of embodiments, closely linked loci are within 5 cM or less of each other.

[0100] As one of skill in the art will recognize, recombination frequencies (and, as a result, map positions) can vary depending on the map used (and the markers that are on the map). Additional markers that are closely linked to (e.g., within about 20 cM, or more preferably within about 10 cM of) the markers identified in Tables 1-14 may readily be used for identification of QTL for metabolic syndrome, insulin resistance, obesity, high blood pressure, dyslipidemia, diabetes and/or myocardial infarction.

[0101] Marker loci are especially useful in the present invention when they are closely linked to target loci (e.g., QTL for metabolic syndrome, insulin resistance, obesity, high blood pressure, dyslipidemia, diabetes and/or myocardial infarction, or, alternatively, simply other marker loci, such as those itemized in Tables 1-14, 17 and 18 that are, themselves linked to such QTL) that they are being used as markers for. The more closely a marker is linked to a target locus that encodes or affects a phenotypic trait, the better an indicator for the target locus that the marker is (due to the reduced cross-over frequency between the target locus and the marker). Thus, in one embodiment, closely linked loci such as a marker locus and a second locus (e.g., a given marker locus of Tables 1-14, 17 and 18 and an additional second locus) display an inter-locus cross-over frequency of about 20% or less, e.g., 15% or less, preferably 10% or less, more preferably about 9% or less, still more preferably about 8% or less, yet more preferably about 7% or less, still more preferably about 6% or less, yet more preferably about 5% or less, still more preferably about 4% or less, yet more preferably about 3% or less, and still more preferably about 2% or less. In highly preferred embodiments, the relevant loci (e.g., a marker locus and a target locus such as a QTL) display a recombination a frequency of about 1% or less, e.g., about 0.75% or less, more preferably about 0.5% or less, or yet more preferably about 0.25% or 0.1% or less. Thus, the loci are about 20 cM, 19 cM, 18 cM, 17 cM, 16 cM, 15 cM, 14 cM, 13 cM, 12 cM, 11 cM, 10 cM, 9 cM, 8 cM, 7 cM, 6 cM, 5 cM, 4 cM, 3 cM, 2 cM, 1 cM, 0.75 cM, 0.5 cM, 0.25 cM, 0 or 0.1 cM or less apart. Put another way, two loci that are localized to the same chromosome, and at such a distance that recombination between the two loci occurs at a frequency of less than 20% (e.g., about 19%, 18%, 17%, 16%, 15%, 14%, 13%, 12%, 11%, 10%, 9%, 8%, 7%, 6%, 5%, 4%, 3%, 2%, 1%, 0.75%, 0.5%, 0.25%, 0.1% or less) are said to be “proximal to” each other. In one aspect, linked markers are within 100 kb (which correlates in humans to about 0.1 cM, depending on local recombination rate), e.g., 50 kb, or even 20 kb or less of each other.

[0102] When referring to the relationship between two genetic elements, such as a genetic element contributing to one or more metabolic syndrome phenotypes and a proximal marker, “coupling” phase linkage indicates the state where the “favorable” allele at the locus is physically associated on the same chromosome strand as the “favorable” allele of the respective linked marker locus. In coupling phase, both favorable alleles are inherited together by progeny that inherit that chromosome strand. In “repulsion” phase linkage, the “favorable” allele at the locus of interest (e.g., a QTL for metabolic syndrome, insulin resistance, obesity, high blood pressure, dyslipidemia, diabetes and/or myocardial infarction) is physically linked with an “unfavorable” allele at the proximal marker locus, and the two “favorable” alleles are not inherited together (i.e., the two loci are “out of phase” with each other).

[0103] In addition to tracking SNP and other polymorphisms in the genome, and in corresponding expressed nucleic acids and polypeptides, expression level differences between individuals or populations for the gene products of Tables 1-14, 17 and 18 in either mRNA or protein form, can also correlate to a metabolic syndrome phenotype. Accordingly, markers of the invention can include any of, e.g.: genomic loci, transcribed nucleic acids, spliced nucleic acids, expressed proteins, levels of transcribed nucleic acids, levels of spliced nucleic acids, and levels of expressed proteins.

[0104] Marker Amplification Strategies

[0105] Amplification primers for amplifying markers (e.g., marker loci) and suitable probes to detect such markers or to genotype a sample with respect to multiple marker alleles, are a feature of the invention. In Tables 1-14, 17 and 18, specific loci for amplification are provided, along with amplicon sequences that one of skill can easily use (optionally in conjunction with known flanking sequences) in the design of such primers. For example, primer selection for long-range PCR is described in U.S. Pat. No. 6,898,531 and U.S. Ser. No. 10/236,480, filed Sep. 5, 2002; for short-range PCR, U.S. Ser. No. 10/341,832, filed Jan. 14, 2003 provides guidance with respect to primer selection. Also, there are publicly available programs such as “Oligo” available for primer design. With such available primer selection and design software, the publicly available human genome sequence and the polymorphism locations as provided in Tables 1-14, 17 and 18, one of skill can design primers to amplify the SNPs of the present invention. Further, it will be appreciated that the precise probe to be used for detection of a nucleic acid comprising a SNP (e.g., an amplicon comprising the SNP) can vary, e.g., any probe that can identify the region of a marker amplicon to be detected can be used in conjunction with the present invention. Further, the configuration of the detection probes can, of course, vary. Thus, the invention is not limited to the sequences recited herein.

[0106] Indeed, it will be appreciated that amplification is not a requirement for marker detection—for example, one can directly detect unamplified genomic DNA simply by performing a Southern blot on a sample of genomic DNA. Procedures for performing Southern blotting, standard amplification (PCR, LCR, or the like) and many other nucleic acid detection methods are well established and are taught, e.g., in Sambrook et al., Molecular Cloning—A Laboratory Manual (3rd Ed.), Vol. 1-3, Cold Spring Harbor Laboratory, Cold Spring Harbor, N.Y., 2000 (“Sambrook”); Current Protocols in Molecular Biology, F. M. Ausubel et al., eds., Current Protocols, a joint venture between Greene Publishing Associates, Inc. and John Wiley & Sons, Inc., (supplemented through 2002) (“Ausubel”)) and PCR Protocols A Guide to Methods and Applications (Innis et al. eds) Academic Press Inc. San Diego, Calif. (1990) (Innis).

[0107] Separate detection probes can also be omitted in amplification/detection methods, e.g., by performing a real time amplification reaction that detects product formation by modification of the relevant amplification primer upon incorporation into a product, incorporation of labeled nucleotides into an amplicon, or by monitoring changes in molecular rotation properties of amplicons as compared to unamplified precursors (e.g., by fluorescence polarization).

[0108] Typically, molecular markers are detected by any established method available in the art, including, without limitation, allele specific hybridization (ASH), detection of single nucleotide extension, array hybridization (optionally including ASH), or other methods for detecting single nucleotide polymorphisms (SNPs), amplified fragment length polymorphism (AFLP) detection, amplified variable sequence detection, randomly amplified polymorphic DNA (RAPD) detection, restriction fragment length polymorphism (RFLP) detection, self-sustained sequence replication detection, simple sequence repeat (SSR) detection, single-strand conformation polymorphisms (SSCP) detection, isozyme marker detection, northern analysis (where expression levels are used as markers), quantitative amplification of mRNA or cDNA, or the like. While the exemplary markers provided in the table herein are SNP markers, any of the aforementioned marker types can be employed in the context of the invention to identify linked loci that affect or effect metabolic syndrome, insulin resistance, obesity, high blood pressure, dyslipidemia, diabetes and/or myocardial infarction.

[0109] Example Techniques for Marker Detection

[0110] The invention provides molecular markers that comprise or are linked to QTL for metabolic syndrome, insulin resistance, obesity, high blood pressure, dyslipidemia, diabetes and/or myocardial infarction. The markers find use in disease predisposition diagnosis, prognosis, treatment and for marker assisted selection for desired traits in livestock. It is not intended that the invention be limited to any particular method for the detection of these markers.

[0111] Markers corresponding to genetic polymorphisms between members of a population can be detected by numerous methods well-established in the art (e.g., PCR-based sequence specific amplification, restriction fragment length polymorphisms (RFLPs), isozyme markers, northern analysis, allele specific hybridization (ASH), array based hybridization, amplified variable sequences of the genome, self-sustained sequence replication, simple sequence repeat (SSR), single nucleotide polymorphism (SNP), random amplified polymorphic DNA (“RAPD”) or amplified fragment length polymorphisms (AFLP). In one additional embodiment, the presence or absence of a molecular marker is determined simply through nucleotide sequencing of the polymorphic marker region. Any of these methods are readily adapted to high throughput analysis.

[0112] Some techniques for detecting genetic markers utilize hybridization of a probe nucleic acid to nucleic acids corresponding to the genetic marker (e.g., amplified nucleic acids produced using genomic DNA as a template). Hybridization formats, including, but not limited to: solution phase, solid phase, mixed phase, or in situ hybridization assays are useful for allele detection. An extensive guide to the hybridization of nucleic acids is found in Tijssen (1993) Laboratory Techniques in Biochemistry and Molecular Biology—Hybridization with Nucleic Acid Probes Elsevier, New York, as well as in Sambrook, Berger and Ausubel.

[0113] For example, markers that comprise restriction fragment length polymorphisms (RFLP) are detected, e.g., by hybridizing a probe which is typically a sub-fragment (or a synthetic oligonucleotide corresponding to a sub-fragment) of the nucleic acid to be detected to restriction digested genomic DNA. The restriction enzyme is selected to provide restriction fragments of at least two alternative (or polymorphic) lengths in different individuals or populations. Determining one or more restriction enzyme that produces informative fragments for each allele of a marker is a simple procedure, well known in the art. After separation by length in an appropriate matrix (e.g., agarose or polyacrylamide) and transfer to a membrane (e.g., nitrocellulose, nylon, etc.), the labeled probe is hybridized under conditions which result in equilibrium binding of the probe to the target followed by removal of excess probe by washing.

[0114] Nucleic acid probes to the marker loci can be cloned and/or synthesized. Any suitable label can be used with a probe of the invention. Detectable labels suitable for use with nucleic acid probes include, for example, any composition detectable by spectroscopic, radioisotopic, photochemical, biochemical, immunochemical, electrical, optical or chemical means. Useful labels include biotin for staining with labeled streptavidin conjugate, magnetic beads, fluorescent dyes, radiolabels, enzymes, and calorimetric labels. Other labels include ligands that bind to antibodies labeled with fluorophores, chemiluminescent agents, and enzymes. A probe can also constitute radiolabelled PCR primers that are used to generate a radiolabelled amplicon. Labeling strategies for labeling nucleic acids and corresponding detection strategies can be found, e.g., in Haugland (2003) Handbook of Fluorescent Probes and Research Chemicals Ninth Edition by Molecular Probes, Inc. (Eugene Oreg.). Additional details regarding marker detection strategies are found below.

[0115] Amplification-Based Detection Methods

[0116] PCR, RT-PCR and LCR are in particularly broad use as amplification and amplification-detection methods for amplifying nucleic acids of interest (e.g., those comprising marker loci), facilitating detection of the nucleic acids of interest. Details regarding the use of these and other amplification methods can be found in any of a variety of standard texts, including, e.g., Sambrook, Ausubel, and Berger. Many available biology texts also have extended discussions regarding PCR and related amplification methods. One of skill will appreciate that essentially any RNA can be converted into a double stranded DNA suitable for restriction digestion, PCR expansion and sequencing using reverse transcriptase and a polymerase (“Reverse Transcription-PCR, or “RT-PCR”). See also, Ausubel, Sambrook and Berger, above. These methods can also be used to quantitatively amplify mRNA or corresponding cDNA, providing an indication of expression levels of mRNA that correspond to the genes or gene products of Tables 1-14 in an individual. Differences in expression levels for these genes between individuals, families, lines and/or populations can be used as markers for metabolic syndrome, insulin resistance, obesity, high blood pressure, dyslipidemia, diabetes and/or myocardial infarction.

[0117] Real Time Amplification/Detection Methods

[0118] In one aspect, real time PCR or LCR is performed on the amplification mixtures described herein, e.g., using molecular beacons or TaqMan™ probes. A molecular beacon (MB) is an oligonucleotide or PNA which, under appropriate hybridization conditions, self-hybridizes to form a stem and loop structure. The MB has a label and a quencher at the termini of the oligonucleotide or PNA; thus, under conditions that permit intra-molecular hybridization, the label is typically quenched (or at least altered in its fluorescence) by the quencher. Under conditions where the MB does not display intra-molecular hybridization (e.g., when bound to a target nucleic acid, e.g., to a region of an amplicon during amplification), the MB label is unquenched. Details regarding standard methods of making and using MBs are well established in the literature and MBs are available from a number of commercial reagent sources. See also, e.g., Leone et al. (1995) “Molecular beacon probes combined with amplification by NASBA enable homogenous real-time detection of RNA.” Nucleic Acids Res. 26:2150-2155; Tyagi and Kramer (1996) “Molecular beacons: probes that fluoresce upon hybridization” Nature Biotechnology 14:303-308; Blok and Kramer (1997) “Amplifiable hybridization probes containing a molecular switch” Mol Cell Probes 11:187-194; Hsuih et al. (1997) “Novel, ligation-dependent PCR assay for detection of hepatitis C in serum” J Clin Microbiol 34:501-507; Kostrikis et al. (1998) “Molecular beacons: spectral genotyping of human alleles” Science 279:1228-1229; Sokol et al. (1998) “Real time detection of DNA:RNA hybridization in living cells” Proc. Natl. Acad. Sci. U.S.A. 95:11538-11543; Tyagi et al. (1998) “Multicolor molecular beacons for allele discrimination” Nature Biotechnology 16:49-53; Bonnet et al. (1999) “Thermodynamic basis of the chemical specificity of structured DNA probes” Proc. Natl. Acad. Sci. U.S.A. 96:6171-6176; Fang et al. (1999) “Designing a novel molecular beacon for surface-immobilized DNA hybridization studies” J. Am. Chem. Soc. 121:2921-2922; Marras et al. (1999) “Multiplex detection of single-nucleotide variation using molecular beacons” Genet. Anal. Biomol. Eng. 14:151-156; and Vet et al. (1999) “Multiplex detection of four pathogenic retroviruses using molecular beacons” Proc. Natl. Acad. Sci. U.S.A. 96:6394-6399. Additional details regarding MB construction and use is found in the patent literature, e.g., U.S. Pat. No. 5,925,517 (Jul. 20, 1999) to Tyagi et al. entitled “Detectably labeled dual conformation oligonucleotide probes, assays and kits;” U.S. Pat. No. 6,150,097 to Tyagi et al (Nov. 21, 2000) entitled “Nucleic acid detection probes having non-FRET fluorescence quenching and kits and assays including such probes” and U.S. Pat. No. 6,037,130 to Tyagi et al (Mar. 14, 2000), entitled “Wavelength-shifting probes and primers and their use in assays and kits.”

[0119] PCR detection and quantification using dual-labeled fluorogenic oligonucleotide probes, commonly referred to as “TaqMan™” probes, can also be performed according to the present invention. These probes are composed of short (e.g., 20-25 base) oligodeoxynucleotides that are labeled with two different fluorescent dyes. On the 5′ terminus of each probe is a reporter dye, and on the 3′ terminus of each probe a quenching dye is found. The oligonucleotide probe sequence is complementary to an internal target sequence present in a PCR amplicon. When the probe is intact, energy transfer occurs between the two fluorophores and emission from the reporter is quenched by the quencher by FRET. During the extension phase of PCR, the probe is cleaved by 5′ nuclease activity of the polymerase used in the reaction, thereby releasing the reporter from the oligonucleotide-quencher and producing an increase in reporter emission intensity. Accordingly, TaqMan™ probes are oligonucleotides that have a label and a quencher, where the label is released during amplification by the exonuclease action of the polymerase used in amplification. This provides a real time measure of amplification during synthesis. A variety of TaqMan™ reagents are commercially available, e.g., from Applied Biosystems (Division Headquarters in Foster City, Calif.) as well as from a variety of specialty vendors such as Biosearch Technologies (e.g., black hole quencher probes). Further details regarding dual-label probe strategies can be found, e.g., in WO92/02638.

[0120] Other similar methods include e.g. fluorescence resonance energy transfer between two adjacently hybridized probes, e.g., using the “LightCycler®” format described in U.S. Pat. No. 6,174,670.

[0121] Array-Based Marker Detection

[0122] Array-based detection can be performed using commercially available arrays, e.g., from Affymetrix (Santa Clara, Calif.) or other manufacturers. Reviews regarding the operation of nucleic acid arrays include Sapolsky et al. (1999) “High-throughput polymorphism screening and genotyping with high-density oligonucleotide arrays.” Genetic Analysis: Biomolecular Engineering 14:187-192; Lockhart (1998) “Mutant yeast on drugs” Nature Medicine 4:1235-1236; Fodor (1997) “Genes, Chips and the Human Genome.” FASEB Journal 11:A879; Fodor (1997) “Massively Parallel Genomics.” Science 277: 393-395; and Chee et al. (1996) “Accessing Genetic Information with High-Density DNA Arrays.” Science 274:610-614. Array based detection is a preferred method for identification markers of the invention in samples, due to the inherently high-throughput nature of array based detection.

[0123] A variety of probe arrays have been described in the literature and can be used in the context of the present invention for detection of markers that can be correlated to the phenotypes noted herein (metabolic syndrome, insulin resistance, obesity, high blood pressure, dyslipidemia, diabetes and/or myocardial infarction, etc.). For example, DNA probe array chips or larger DNA probe array wafers (from which individual chips would otherwise be obtained by breaking up the wafer) are used in one embodiment of the invention. DNA probe array wafers generally comprise glass wafers on which high density arrays of DNA probes (short segments of DNA) have been placed. Each of these wafers can hold, for example, approximately 60 million DNA probes that are used to recognize longer sample DNA sequences (e.g., from individuals or populations, e.g., that comprise markers of interest). The recognition of sample DNA by the set of DNA probes on the glass wafer takes place through DNA hybridization. When a DNA sample hybridizes with an array of DNA probes, the sample binds to those probes that are complementary to the sample DNA sequence. By evaluating to which probes the sample DNA for an individual hybridizes more strongly, it is possible to determine whether a known sequence of nucleic acid is present or not in the sample, thereby determining whether a marker found in the nucleic acid is present. One can also use this approach to perform ASH, by controlling the hybridization conditions to permit single nucleotide discrimination, e.g., for SNP identification and for genotyping a sample for one or more SNPs.

[0124] The use of DNA probe arrays to obtain allele information typically involves the following general steps: design and manufacture of DNA probe arrays, preparation of the sample, hybridization of sample DNA to the array, detection of hybridization events and data analysis to determine sequence. Preferred wafers are manufactured using a process adapted from semiconductor manufacturing to achieve cost effectiveness and high quality, and are available, e.g., from Affymetrix, Inc. of Santa Clara, Calif.

[0125] For example, probe arrays can be manufactured by light-directed chemical synthesis processes, which combine solid-phase chemical synthesis with photolithographic fabrication techniques as employed in the semiconductor industry. Using a series of photolithographic masks to define chip exposure sites, followed by specific chemical synthesis steps, the process constructs high-density arrays of oligonucleotides, with each probe in a predefined position in the array. Multiple probe arrays can be synthesized simultaneously on a large glass wafer. This parallel process enhances reproducibility and helps achieve economies of scale.

[0126] Once fabricated, DNA probe arrays can be used to obtain data regarding presence and/or expression levels for markers of interest. The DNA samples may be tagged with biotin and/or a fluorescent reporter group by standard biochemical methods. The labeled samples are incubated with an array, and segments of the samples bind, or hybridize, with complementary sequences on the array. The array can be washed and/or stained to produce a hybridization pattern. The array is then scanned and the patterns of hybridization are detected by emission of light from the fluorescent reporter groups. Additional details regarding these procedures are found in the examples below. Because the identity and position of each probe on the array is known, the nature of the DNA sequences in the sample applied to the array can be determined. When these arrays are used for genotyping experiments, they can be referred to as genotyping arrays.

[0127] The nucleic acid sample to be analyzed is isolated, amplified and, typically, labeled with biotin and/or a fluorescent reporter group. The labeled nucleic acid sample is then incubated with the array using a fluidics station and hybridization oven. The array can be washed and or stained or counter-stained, as appropriate to the detection method. After hybridization, washing and staining, the array is inserted into a scanner, where patterns of hybridization are detected. The hybridization data are collected as light emitted from the fluorescent reporter groups already incorporated into the labeled nucleic acid, which is now bound to the probe array. Probes that most clearly match the labeled nucleic acid produce stronger signals than those that have mismatches. Since the sequence and position of each probe on the array are known, by complementarity, the identity of the nucleic acid sample applied to the probe array can be identified.

[0128] In one embodiment, two DNA samples may be differentially labeled and hybridized with a single set of the designed genotyping arrays. In this way two sets of data can be obtained from the same physical arrays. Labels that can be used include, but are not limited to, cychrome, fluorescein, or biotin (later stained with phycoerythrin-streptavidin after hybridization). Two-color labeling is described in U.S. Pat. No. 6,342,355, incorporated herein by reference in its entirety. Each array may be scanned such that the signal from both labels is detected simultaneously, or may be scanned twice to detect each signal separately.

[0129] Intensity data is collected by the scanner for all the markers for each of the individuals that are tested for presence of the marker. The measured intensities are a measure indicative of the amount of a particular marker present in the sample for a given individual (expression level and/or number of copies of the allele present in an individual, depending on whether genomic or expressed nucleic acids are analyzed). This can be used to determine whether the individual is homozygous or heterozygous for the marker of interest. The intensity data is processed to provide corresponding marker information for the various intensities.

[0130] Additional Details Regarding Amplified Variable Sequences, SSR, AFLP ASH, SNPs and Isozyme Markers

[0131] Amplified variable sequences refer to amplified sequences of the genome which exhibit high nucleic acid residue variability between members of the same species. All organisms have variable genomic sequences and each organism (with the exception of a clone) has a different set of variable sequences. Once identified, the presence of specific variable sequence can be used to predict phenotypic traits. Preferably, DNA from the genome serves as a template for amplification with primers that flank a variable sequence of DNA. The variable sequence is amplified and then sequenced.

[0132] Alternatively, self-sustained sequence replication can be used to identify genetic markers. Self-sustained sequence replication refers to a method of nucleic acid amplification using target nucleic acid sequences which are replicated exponentially, in vitro, under substantially isothermal conditions by using three enzymatic activities involved in retroviral replication: (1) reverse transcriptase, (2) Rnase H, and (3) a DNA-dependent RNA polymerase (Guatelli et al. (1990) Proc Natl Acad Sci USA 87:1874). By mimicking the retroviral strategy of RNA replication by means of cDNA intermediates, this reaction accumulates cDNA and RNA copies of the original target.

[0133] Amplified fragment length polymorphisms (AFLP) can also be used as genetic markers (Vos et al. (1995) Nucl Acids Res 23:4407). The phrase “amplified fragment length polymorphism” refers to selected restriction fragments which are amplified before or after cleavage by a restriction endonuclease. The amplification step allows easier detection of specific restriction fragments. AFLP allows the detection large numbers of polymorphic markers and has been used for genetic mapping (Becker et al. (1995) Mol Gen Genet 249:65; and Meksem et al. (1995) Mol Gen Genet 249:74).

[0134] Allele-specific hybridization (ASH) can be used to identify the genetic markers of the invention. ASH technology is based on the stable annealing of a short, single-stranded, oligonucleotide probe to a completely complementary single-strand target nucleic acid. Detection may be accomplished via an isotopic or non-isotopic label attached to the probe.

[0135] For each polymorphism, two or more different ASH probes are designed to have identical DNA sequences except at the polymorphic nucleotides. Each probe will have exact homology with one allele sequence so that the range of probes can distinguish all the known alternative allele sequences. Each probe is hybridized to the target DNA. With appropriate probe design and hybridization conditions, a single-base mismatch between the probe and target DNA will prevent hybridization. In this manner, only one of the alternative probes will hybridize to a target sample that is homozygous or homogenous for an allele. Samples that are heterozygous or heterogeneous for two alleles will hybridize to both of two alternative probes.

[0136] ASH markers are used as dominant markers where the presence or absence of only one allele is determined from hybridization or lack of hybridization by only one probe. The alternative allele may be inferred from the lack of hybridization. ASH probe and target molecules are optionally RNA or DNA; the target molecules are any length of nucleotides beyond the sequence that is complementary to the probe; the probe is designed to hybridize with either strand of a DNA target; the probe ranges in size to conform to variously stringent hybridization conditions, etc.

[0137] PCR allows the target sequence for ASH to be amplified from low concentrations of nucleic acid in relatively small volumes. Otherwise, the target sequence from genomic DNA is digested with a restriction endonuclease and size separated by gel electrophoresis. Hybridizations typically occur with the target sequence bound to the surface of a membrane or, as described in U.S. Pat. No. 5,468,613, the ASH probe sequence may be bound to a membrane.

[0138] In one embodiment, ASH data are typically obtained by amplifying nucleic acid fragments (amplicons) from genomic DNA using PCR, transferring the amplicon target DNA to a membrane in a dot-blot format, hybridizing a labeled oligonucleotide probe to the amplicon target, and observing the hybridization dots by autoradiography.

[0139] Single nucleotide polymorphisms (SNP) are markers that consist of a shared sequence differentiated on the basis of a single nucleotide. Typically, this distinction is detected by differential migration patterns of an amplicon comprising the SNP on e.g., an acrylamide gel. However, alternative modes of detection, such as hybridization, e.g., ASH, or RFLP analysis are also appropriate.

[0140] Isozyme markers can be employed as genetic markers, e.g., to track isozyme markers linked to the markers herein. Isozymes are multiple forms of enzymes that differ from one another in their amino acid, and therefore their nucleic acid sequences. Some isozymes are multimeric enzymes contain slightly different subunits. Other isozymes are either multimeric or monomeric but have been cleaved from the proenzyme at different sites in the amino acid sequence. Isozymes can be characterized and analyzed at the protein level, or alternatively, isozymes which differ at the nucleic acid level can be determined. In such cases any of the nucleic acid based methods described herein can be used to analyze isozyme markers.

[0141] Additional Details Regarding Nucleic Acid Amplification

[0142] As noted, nucleic acid amplification techniques such as PCR and LCR are well known in the art and can be applied to the present invention to amplify and/or detect nucleic acids of interest, such as nucleic acids comprising marker loci. Examples of techniques sufficient to direct persons of skill through such in vitro methods, including the polymerase chain reaction (PCR), the ligase chain reaction (LCR), Qβ-replicase amplification and other RNA polymerase mediated techniques (e.g., NASBA), are found in the references noted above, e.g., Innis, Sambrook, Ausubel, and Berger. Additional details are found in Mullis et al. (1987) U.S. Pat. No. 4,683,202; Arnheim & Levinson (Oct. 1, 1990) C&EN 36-47; The Journal Of NIH Research (1991) 3, 81-94; (Kwoh et al. (1989) Proc. Natl. Acad. Sci. USA 86, 1173; Guatelli et al. (1990) Proc. Natl. Acad. Sci. USA 87, 1874; Lomell et al. (1989) J. Clin. Chem 35, 1826; Landegren et al., (1988) Science 241, 1077-1080; Van Brunt (1990) Biotechnology 8, 291-294; Wu and Wallace, (1989) Gene 4, 560; Barringer et al. (1990) Gene 89, 117, and Sooknanan and Malek (1995) Biotechnology 13: 563-564. Improved methods of amplifying large nucleic acids by PCR, which is useful in the context of positional cloning, are further summarized in Cheng et al. (1994) Nature 369: 684, and the references therein, in which PCR amplicons of up to 40 kb are generated. Methods for long-range PCR are disclosed, for example, in U.S. patent application Ser. No. 10/042,406, filed Jan. 9, 2002, entitled “Algorithms for Selection of Primer Pairs”; U.S. patent application Ser. No. 10/236,480, filed Sep. 9, 2002, entitled “Methods for Amplification of Nucleic Acids”; and U.S. Pat. No. 6,740,510, issued May 25, 2004, entitled “Methods for Amplification of Nucleic Acids”. U.S. Ser. No. 10/341,832 (filed Jan. 14, 2003) also provides details regarding primer picking methods for performing short range PCR.

[0143] Detection of Protein Expression Products

[0144] Proteins such as those encoded by the genes noted in Tables 1-14, 17 and 18 are encoded by nucleic acids, including those comprising markers that are correlated to the phenotypes of interest herein. For a description of the basic paradigm of molecular biology, including the expression (transcription and/or translation) of DNA into RNA into protein, see, Alberts et al. (2002) Molecular Biology of the Cell, 4^{th} Edition Taylor and Francis, Inc., ISBN: 0815332181 (“Alberts”), and Lodish et al. (1999) Molecular Cell Biology, 4^{th} Edition W H Freeman & Co, ISBN: 071673706X (“Lodish”). Accordingly, proteins corresponding to the genes in Tables 1-14, 17 and 18 can be detected as markers, e.g., by detecting different protein isotypes between individuals or populations, or by detecting a differential presence, absence or expression level of such a protein of interest (e.g., expression level of a gene product of Tables 1-14, 17 and 18).

[0145] A variety of protein detection methods are known and can be used to distinguish markers. In addition to the various references noted supra, a variety of protein manipulation and detection methods are well known in the art, including, e.g., those set forth in R. Scopes, Protein Purification, Springer-Verlag, N.Y. (1982); Deutscher, Methods in Enzymology Vol. 182: Guide to Protein Purification, Academic Press, Inc. N.Y. (1990); Sandana (1997) Bioseparation of Proteins, Academic Press, Inc.; Bollag et al. (1996) Protein Methods, 2^{nd} Edition Wiley-Liss, NY; Walker (1996) The Protein Protocols Handbook Humana Press, NJ, Harris and Angal (1990) Protein Purification Applications: A Practical Approach IRL Press at Oxford, Oxford, England; Harris and Angal Protein Purification Methods: A Practical Approach IRL Press at Oxford, Oxford, England; Scopes (1993) Protein Purification: Principles and Practice 3^{rd} Edition Springer Verlag, NY; Janson and Ryden (1998) Protein Purification: Principles High Resolution Methods and Applications, Second Edition Wiley-VCH, NY; and Walker (1998) Protein Protocols on CD-ROM Humana Press, NJ; and the references cited therein. Additional details regarding protein purification and detection methods can be found in Satinder Ahuja ed., Handbook of Bioseparations, Academic Press (2000).

[0146] “Proteomic” detection methods, which detect many proteins simultaneously have been described. These can include various multidimensional electrophoresis methods (e.g., 2-d gel electrophoresis), mass spectrometry based methods (e.g., SELDI, MALDI, electrospray, etc.), or surface plasmon reasonance methods. For example, in MALDI, a sample is usually mixed with an appropriate matrix, placed on the surface of a probe and examined by laser desorption/ionization. The technique of MALDI is well known in the art. See, e.g., U.S. Pat. No. 5,045,694 (Beavis et al.), U.S. Pat. No. 5,202,561 (Gleissmann et al.), and U.S. Pat. No. 6,111,251 (Hillenkamp). Similarly, for SELDI, a first aliquot is contacted with a solid support-bound (e.g., substrate-bound) adsorbent. A substrate is typically a probe (e.g., a biochip) that can be positioned in an interrogatable relationship with a gas phase ion spectrometer. SELDI is also a well known technique, and has been applied to diagnostic proteomics. See, e.g. Issaq et al. (2003) “SELDI-TOF MS for Diagnostic Proteomics” Analytical Chemistry 75:149A-155A.

[0147] In general, the above methods can be used to detect different forms (alleles) of proteins and/or can be used to detect different expression levels of the proteins (which can be due to allelic differences) between individuals, families, lines, populations, etc. Differences in expression levels, when controlled for environmental factors, can be indicative of different alleles at a QTL for the gene of interest, even if the encoded differentially expressed proteins are themselves identical. This occurs, for example, where there are multiple allelic forms of a gene in non-coding regions, e.g., regions such as promoters or enhancers that control gene expression. Thus, detection of differential expression levels can be used as a method of detecting allelic differences.

[0148] In other aspects of the present invention, a gene comprising, in linkage disequilibrium with, or under the control of a nucleic acid associated with metabolic syndrome, insulin resistance, obesity, high blood pressure, dyslipidemia, diabetes and/or myocardial infarction may exhibit differential allelic expression. “Differential allelic expression” as used herein refers to both qualitative and quantitative differences in the allelic expression of multiple alleles of a single gene present in a cell. As such, a gene displaying differential allelic expression may have one allele expressed at a different time or level as compared to a second allele in the same cell/tissue. For example, an allele associated with metabolic syndrome may be expressed at a higher or lower level than an allele that is not associated with metabolic syndrome, even though both are alleles of the same gene and are present in the same cell/tissue. Differential allelic expression and analysis methods are disclosed in detail in U.S. patent application Ser. No. 10/438,184, filed May 13, 2003 and U.S. patent application Ser. No. 10/845,316, filed May 12, 2004, both of which are entitled “Allele-specific expression patterns.” Detection of a differential allelic expression pattern of one or more nucleic acids, or fragments, derivatives, polymorphisms, variants or complements thereof, associated with susceptibility to metabolic syndrome, insulin resistance, obesity, high blood pressure, dyslipidemia, diabetes and/or myocardial infarction is a prognostic and diagnostic for susceptibility to metabolic syndrome, insulin resistance, obesity, high blood pressure, dyslipidemia, diabetes and/or myocardial infarction, respectively; likewise, detection of a differential allelic expression pattern of one or more nucleic acids, or fragments, derivatives, polymorphisms, variants or complements thereof, associated with resistance to metabolic syndrome, insulin resistance, obesity, high blood pressure, dyslipidemia, diabetes and/or myocardial infarction is a prognostic and diagnostic for resistance to metabolic syndrome, insulin resistance, obesity, high blood pressure, dyslipidemia, diabetes and/or myocardial infarction, respectively.

[0149] Additional Details Regarding Types of Markers Appropriate for Screening

[0150] The biological markers that are screened for correlation to the phenotypes herein can be any of those types of markers that can be detected by screening, e.g., genetic markers such as allelic variants of a genetic locus (e.g., as in SNPs), expression markers (e.g., presence or quantity of mRNAs and/or proteins), and/or the like.

[0151] The nucleic acid of interest to be amplified, transcribed, translated and/or detected in the methods of the invention can be essentially any nucleic acid, though nucleic acids derived from human sources are especially relevant to the detection of markers associated with disease diagnosis and clinical applications. The sequences for many nucleic acids and amino acids (from which nucleic acid sequences can be derived via reverse translation) are available, including for the genes or gene products of Tables 1-14, 17 and 18. Common sequence repositories for known nucleic acids include GenBank® EMBL, DDBJ and the NCBI. Other repositories can easily be identified by searching the internet. The nucleic acid to be amplified, transcribed, translated and/or detected can be an RNA (e.g., where amplification includes RT-PCR or LCR, the Van-Gelder Eberwine reaction or Ribo-SPIA) or DNA (e.g., amplified DNA, cDNA or genomic DNA), or even any analogue thereof (e.g., for detection of synthetic nucleic acids or analogues thereof, e.g., where the sample of interest includes or is used to derive or synthesize artificial nucleic acids). Any variation in a nucleic acid sequence or expression level between individuals or populations can be detected as a marker, e.g., a mutation, a polymorphism, a single nucleotide polymorphism (SNP), an allele, an isotype, expression of an RNA or protein, etc. One can detect variation in sequence, expression levels or gene copy numbers as markers that can be correlated to metabolic syndrome, insulin resistance, obesity, high blood pressure, dyslipidemia, diabetes and/or myocardial infarction.

[0152] For example, the methods of the invention are useful in screening samples derived from patients for a marker nucleic acid of interest, e.g., from bodily fluids (blood, saliva, urine etc.), tissue, and/or waste from the patient. Thus, stool, sputum, saliva, blood, lymph, tears, sweat, urine, vaginal secretions, ejaculatory fluid or the like can easily be screened for nucleic acids by the methods of the invention, as can essentially any tissue of interest that contains the appropriate nucleic acids. These samples are typically taken, following informed consent, from a patient by standard medical laboratory methods.

[0153] Prior to amplification and/or detection of a nucleic acid comprising a marker, the nucleic acid is optionally purified from the samples by any available method, e.g., those taught in Berger and Kimmel, Guide to Molecular Cloning Techniques Methods in Enzymology volume 152 Academic Press, Inc., San Diego, Calif. (Berger); Sambrook et al., Molecular Cloning—A Laboratory Manual (3rd Ed.), Vol. 1-3, Cold Spring Harbor Laboratory, Cold Spring Harbor, N.Y., 2001 (“Sambrook”); and/or Current Protocols in Molecular Biology, F. M. Ausubel et al., eds., Current Protocols, a joint venture between Greene Publishing Associates, Inc. and John Wiley & Sons, Inc., (supplemented through 2002) (“Ausubel”)). A plethora of kits are also commercially available for the purification of nucleic acids from cells or other samples (see, e.g., EasyPrep™, FlexiPrep™, both from Pharmacia Biotech; StrataClean™, from Stratagene; and, QIAprep™ from Qiagen). Alternately, samples can simply be directly subjected to amplification or detection, e.g., following aliquotting and/or dilution.

[0154] Examples of markers can include polymorphisms, single nucleotide polymorphisms, presence of one or more nucleic acids in a sample, absence of one or more nucleic acids in a sample, presence of one or more genomic DNA sequences, absence or one or more genomic DNA sequences, presence of one or more mRNAs, absence of one or more mRNAs, expression levels of one or more mRNAs, presence of one or more proteins, expression levels of one or more proteins, and/or data derived from any of the preceding or combinations thereof. Essentially any number of markers can be detected, using available methods, e.g., using array technologies that provide high density, high throughput marker mapping. Thus, at least about 10, 20, 50, 100, 1,000, 10,000, or even 100,000 or more genetic markers can be tested, simultaneously or in a serial fashion (or combination thereof), for correlation to a relevant phenotype, in the first and/or second population. Combinations of markers can also be desirably tested, e.g., to identify genetic combinations or combinations of expression patterns in populations that are correlated to the phenotype.

[0155] As noted, the biological marker to be detected can be any detectable biological component. Commonly detected markers include genetic markers (e.g., DNA sequence markers present in genomic DNA or expression products thereof) and expression markers (which can reflect genetically coded factors, environmental factors, or both). Where the markers are expression markers, the methods can include determining a first expression profile for a first individual or population (e.g., of one or more expressed markers, e.g., a set of expressed markers) and comparing the first expression profile to a second expression profile for the second individual or population. In this example, correlating expression marker(s) to a particular phenotype can include correlating the first or second expression profile to the phenotype of interest.

[0156] Probe/Primer Synthesis Methods

[0157] In general, synthetic methods for making oligonucleotides, including probes, primers, molecular beacons, PNAs, LNAs (locked nucleic acids), etc., are well known. For example, oligonucleotides can be synthesized chemically according to the solid phase phosphoramidite triester method described by Beaucage and Caruthers (1981), Tetrahedron Letts., 22(20):1859-1862, e.g., using a commercially available automated synthesizer, e.g., as described in Needham-VanDevanter et al. (1984) Nucleic Acids Res., 12:6159-6168. Oligonucleotides, including modified oligonucleotides can also be ordered from a variety of commercial sources known to persons of skill. There are many commercial providers of oligo synthesis services, and thus this is a broadly accessible technology. Any nucleic acid can be custom ordered from any of a variety of commercial sources, such as The Midland Certified Reagent Company (mcrc@oligos.com), The Great American Gene Company (www.genco.com), ExpressGen Inc. (www.expressgen.com), Operon Technologies Inc. (Alameda, Calif.) and many others. Similarly, PNAs can be custom ordered from any of a variety of sources, such as PeptidoGenic (pkim@ccnet.com), HTI Bio-products, inc. (htibio.com), BMA Biomedicals Ltd (U.K.), Bio-Synthesis, Inc., and many others.

[0158] In Silico Marker Detection

[0159] In some embodiments, in silico methods can be used to detect the marker loci of interest. For example, the sequence of a nucleic acid comprising the marker locus of interest can be stored in a computer. The desired marker locus sequence or its homolog can be identified using an appropriate nucleic acid search algorithm as provided by, for example, in such readily available programs as BLAST, or even simple word processors. The entire human genome has been sequenced and, thus, sequence information can be used to identify marker regions, flanking nucleic acids, etc.

[0160] Amplification Primers for Marker Detection

[0161] In some preferred embodiments, the molecular markers of the invention are detected using a suitable PCR-based detection method, where the size or sequence of the PCR amplicon is indicative of the absence or presence of the marker (e.g., a particular marker allele). In these types of methods, PCR primers are hybridized to the conserved regions flanking the polymorphic marker region.

[0162] It will be appreciated that suitable primers to be used with the invention can be designed using any suitable method. It is not intended that the invention be limited to any particular primer or primer pair. For example, primers can be designed using any suitable software program, such as LASERGENE®, e.g., taking account of publicly available sequence information.

[0163] In some embodiments, the primers of the invention are radiolabelled, or labeled by any suitable means (e.g., using a non-radioactive fluorescent tag), to allow for rapid visualization of the different size amplicons following an amplification reaction without any additional labeling step or visualization step. In some embodiments, the primers are not labeled, and the amplicons are visualized following their size resolution, e.g., following agarose or acrylamide gel electrophoresis. In some embodiments, ethidium bromide staining of the PCR amplicons following size resolution allows visualization of the different size amplicons.

[0164] It is not intended that the primers of the invention be limited to generating an amplicon of any particular size. For example, the primers used to amplify the marker loci and alleles herein are not limited to amplifying the entire region of the relevant locus. The primers can generate an amplicon of any suitable length that is longer or shorter than those given as example amplicons in Tables 1-14, 17 and 18. In some embodiments, marker amplification produces an amplicon at least 20 nucleotides in length, or alternatively, at least 50 nucleotides in length, or alternatively, at least 100 nucleotides in length, or alternatively, at least 200 nucleotides in length.

[0165] Detection of Markers for Positional Cloning

[0166] In some embodiments, a nucleic acid probe is used to detect a nucleic acid that comprises a marker sequence. Such probes can be used, for example, in positional cloning to isolate nucleotide sequences linked to the marker nucleotide sequence. It is not intended that the nucleic acid probes of the invention be limited to any particular size. In some embodiments, nucleic acid probe is at least 20 nucleotides in length, or alternatively, at least 50 nucleotides in length, or alternatively, at least 100 nucleotides in length, or alternatively, at least 200 nucleotides in length.

[0167] A hybridized probe is detected using, autoradiography, fluorography or other similar detection techniques depending on the label to be detected. Examples of specific hybridization protocols are widely available in the art, see, e.g., Berger, Sambrook, and Ausubel, all herein.

[0168] Generation of Transgenic Cells and Organisms

[0169] The present invention also provides cells and organisms which are transformed with nucleic acids corresponding to QTL identified according to the invention. For example, such nucleic acids include chromosome intervals (e.g., genomic fragments), ORFs and/or cDNAs that encode genes that correspond or are linked to QTL for metabolic syndrome, insulin resistance, obesity, high blood pressure, dyslipidemia, diabetes and/or myocardial infarction. Additionally, the invention provides for the production of polypeptides that influence metabolic syndrome, insulin resistance, obesity, high blood pressure, dyslipidemia, diabetes and/or myocardial infarction. This is useful, e.g., to influence metabolic syndrome, insulin resistance, obesity, high blood pressure, dyslipidemia, diabetes and/or myocardial infarction in livestock populations. The generation of transgenic cells also provides commercially useful cells having defined genes that influence phenotype, thereby providing a platform for screening potential modulators of phenotype, as well as basic research into the mechanism of action for each of the genes of interest. In addition, gene therapy can be used to introduce desirable genes into individuals or populations thereof. Such gene therapies may be used to provide a treatment for a disorder exhibited by an individual, or may be used as a preventative measure to prevent the development of such a disorder in an individual at risk. Knock-out animals, such as knock-out mice, can be produced for any of the genes noted herein, to further identify phenotypic effects of the genes. Similarly, recombinant mice or other animals can be used as models for human disease, e.g., by knocking out any natural gene herein and introduction (e.g., via homologous recombination) of the human (or other species) gene into the animal. The effects of modulators on the heterologous human genes and gene products can then be monitored in the resulting in vivo model animal system.

[0170] General texts which describe molecular biological techniques for the cloning and manipulation of nucleic acids and production of encoded polypeptides include Berger and Kimmel, Guide to Molecular Cloning Techniques, Methods in Enzymology volume 152 Academic Press, Inc., San Diego, Calif. (Berger); Sambrook et al., Molecular Cloning—A Laboratory Manual (3rd Ed.), Vol. 1-3, Cold Spring Harbor Laboratory, Cold Spring Harbor, N.Y., 2001 (“Sambrook”) and Current Protocols in Molecular Biology, F. M. Ausubel et al., eds., Current Protocols, a joint venture between Greene Publishing Associates, Inc. and John Wiley & Sons, Inc., (supplemented through 2004 or later) (“Ausubel”)). These texts describe mutagenesis, the use of vectors, promoters and many other relevant topics related to, e.g., the generation of clones that comprise nucleic acids of interest, e.g., genes, marker loci, marker probes, QTL that segregate with marker loci, etc.

[0171] Host cells are genetically engineered (e.g., transduced, transfected, transformed, etc.) with the vectors of this invention (e.g., vectors, such as expression vectors which comprise an ORF derived from or related to a QTL) which can be, for example, a cloning vector, a shuttle vector or an expression vector. Such vectors are, for example, in the form of a plasmid, a phagemid, an agrobacterium, a virus, a naked polynucleotide (linear or circular), or a conjugated polynucleotide. Vectors can be introduced into bacteria, especially for the purpose of propagation and expansion. Additional details regarding nucleic acid introduction methods are found in Sambrook, Berger and Ausubel, infra. The method of introducing a nucleic acid of the present invention into a host cell is not critical to the instant invention, and it is not intended that the invention be limited to any particular method for introducing exogenous genetic material into a host cell. Thus, any suitable method, e.g., including but not limited to the methods provided herein, which provides for effective introduction of a nucleic acid into a cell or protoplast can be employed and finds use with the invention.

[0172] The engineered host cells can be cultured in conventional nutrient media modified as appropriate for such activities as, for example, activating promoters or selecting transformants. In addition to Sambrook, Berger and Ausubel, all infra, Atlas and Parks (eds) The Handbook of Microbiological Media (1993) CRC Press, Boca Raton, Fla. and available commercial literature such as the Life Science Research Cell Culture Catalogue (2004) from Sigma-Aldrich, Inc (St Louis, Mo.) (“Sigma-LSRCCC”) provide additional details.

[0173] Making Knock-Out Animals and Transgenics

[0174] Transgenic animals are a useful tool for studying gene function and testing putative gene or gene product modulators. Human (or other selected species) genes herein can be introduced in place of endogenous genes of a laboratory animal, making it possible to study function of the human (or other, e.g., livestock) gene or gene product in the easily manipulated and studied laboratory animal.

[0175] It will be appreciated that there is not always a precise correspondence for responses to modulators between homologous gene in different animals, making the ability to study the human or other species of interest (e.g., a livestock species) in a laboratory animal particularly useful. Although similar genetic manipulations can be performed in tissue culture, the interaction of genes and gene products in the context of an intact organism provides a more complete and physiologically relevant picture of such genes and gene products than can be achieved in simple cell-based screening assays. Accordingly, one feature of the invention is the creation of transgenic animals comprising heterologous genes of interest, e.g., genes listed in Tables 1-14, 17 and 18.

[0176] In general, such a transgenic animal is simply an animal that has had appropriate genes (or partial genes, e.g., comprising coding sequences coupled to a promoter) introduced into one or more of its cells artificially. This is most commonly done in one of two ways. First, a DNA can be integrated randomly by injecting it into the pronucleus of a fertilized ovum. In this case, the DNA can integrate anywhere in the genome. In this approach, there is no need for homology between the injected DNA and the host genome. Second, targeted insertion can be accomplished by introducing the (heterologous) DNA into embryonic stem (ES) cells and selecting for cells in which the heterologous DNA has undergone homologous recombination with homologous sequences of the cellular genome. Typically, there are several kilobases of homology between the heterologous and genomic DNA, and positive selectable markers (e.g., antibiotic resistance genes) are included in the heterologous DNA to provide for selection of transformants. In addition, negative selectable markers (e.g., “toxic” genes such as barnase) can be used to select against cells that have incorporated DNA by non-homologous recombination (random insertion).

[0177] One common use of targeted insertion of DNA is to make knock-out mice. Typically, homologous recombination is used to insert a selectable gene driven by a constitutive promoter into an essential exon of the gene that one wishes to disrupt (e.g., the first coding exon). To accomplish this, the selectable marker is flanked by large stretches of DNA that match the genomic sequences surrounding the desired insertion point. Once this construct is electroporated into ES cells, the cells' own machinery performs the homologous recombination. To make it possible to select against ES cells that incorporate DNA by non-homologous recombination, it is common for targeting constructs to include a negatively selectable gene outside the region intended to undergo recombination (typically the gene is cloned adjacent to the shorter of the two regions of genomic homology). Because DNA lying outside the regions of genomic homology is lost during homologous recombination, cells undergoing homologous recombination cannot be selected against, whereas cells undergoing random integration of DNA often can. A commonly used gene for negative selection is the herpes virus thymidine kinase gene, which confers sensitivity to the drug gancyclovir.

[0178] Following positive selection and negative selection if desired, ES cell clones are screened for incorporation of the construct into the correct genomic locus. Typically, one designs a targeting construct so that a band normally seen on a Southern blot or following PCR amplification becomes replaced by a band of a predicted size when homologous recombination occurs. Since ES cells are diploid, only one allele is usually altered by the recombination event so, when appropriate targeting has occurred, one usually sees bands representing both wild type and targeted alleles.

[0179] The embryonic stem (ES) cells that are used for targeted insertion are derived from the inner cell masses of blastocysts (early mouse embryos). These cells are pluripotent, meaning they can develop into any type of tissue.

[0180] Once positive ES clones have been grown up and frozen, the production of transgenic animals can begin. Donor females are mated, blastocysts are harvested, and several ES cells are injected into each blastocyst. Blastocysts are then implanted into a uterine horn of each recipient. By choosing an appropriate donor strain, the detection of chimeric offspring (i.e., those in which some fraction of tissue is derived from the transgenic ES cells) can be as simple as observing hair and/or eye color. If the transgenic ES cells do not contribute to the germline (sperm or eggs), the transgene cannot be passed on to offspring.

[0181] Correlating Markers to Phenotypes

[0182] One aspect of the invention is a description of correlations between polymorphisms within or linked to the genes and polymorphisms noted in Tables 1-14 and metabolic syndrome phenotypes. Specifically, Table 1 lists genes and polymorphisms that are associated with metabolic syndrome; Table 2 lists genes and polymorphisms that are associated with diabetes; Table 3 lists genes and polymorphisms that are associated with myocardial infarction; Table 4 lists genes and polymorphisms that are associated with hypertension; Table 5 lists genes and polymorphisms that are associated with body mass index; Table 6 lists genes and polymorphisms that are associated with waist circumference; Table 7 lists genes and polymorphisms that are associated with diastolic blood pressure; Table 8 lists genes and polymorphisms that are associated with systolic blood pressure; Table 9 lists genes and polymorphisms that are associated with HDL cholesterol levels; Table 10 lists genes and polymorphisms that are associated with triglyceride levels; Table 11 lists genes and polymorphisms that are associated with insulin levels in nondiabetics; Table 12 lists genes and polymorphisms that are associated with insulin levels in non-Mexicans; Table 13 lists genes and polymorphisms that are associated with insulin resistance in nondiabetics; and Table 14 lists genes and polymorphisms that are associated with insulin resistance in non-Mexicans. Further details about these metabolic syndrome phenotypes is provided in Example 10, below. An understanding of these correlations can be used in the present invention to correlate information regarding a set of polymorphisms that an individual or sample is determined to possess and a phenotype that they are likely to display. Further, higher order correlations that account for combinations of alleles in one or more different genes can also be assessed for correlations to phenotype.

[0183] These correlations can be performed by any method that can identify a relationship between an allele and a phenotype, or a combination of alleles and a combination of phenotypes. For example, alleles in one or more of the genes or loci in Tables 1-14 can be correlated with one or more metabolic syndrome, insulin resistance, obesity, high blood pressure, dyslipidemia, diabetes and/or myocardial infarction phenotypes. Most typically, these methods involve referencing a look up table that comprises correlations between alleles of the polymorphism and the phenotype. The table can include data for multiple allele-phenotype relationships and can take account of additive or other higher order effects of multiple allele-phenotype relationships, e.g., through the use of statistical tools such as principle component analysis, heuristic algorithms, etc.

[0184] Correlation of a marker to a phenotype optionally includes performing one or more statistical tests for correlation. Many statistical tests are known, and most are computer-implemented for ease of analysis. A variety of statistical methods of determining associations/correlations between phenotypic traits and biological markers are known and can be applied to the present invention. For an introduction to the topic, see, Hartl (1981) A Primer of Population Genetics Washington University, Saint Louis Sinauer Associates, Inc. Sunderland, Mass. ISBN: 0-087893-271-2. A variety of appropriate statistical models are described in Lynch and Walsh (1998) Genetics and Analysis of Quantitative Traits, Sinauer Associates, Inc. Sunderland Mass. ISBN 0-87893-481-2. These models can, for example, provide for correlations between genotypic and phenotypic values, characterize the influence of a locus on a phenotype, sort out the relationship between environment and genotype, determine dominance or penetrance of genes, determine maternal and other epigenetic effects, determine principle components in an analysis (via principle component analysis, or “PCA”), and the like. The references cited in these texts provides considerable further detail on statistical models for correlating markers and phenotype.

[0185] In addition to standard statistical methods for determining correlation, other methods that determine correlations by pattern recognition and training, such as the use of genetic algorithms, can be used to determine correlations between markers and phenotypes. This is particularly useful when identifying higher order correlations between multiple alleles and multiple phenotypes. To illustrate, neural network approaches can be coupled to genetic algorithm-type programming for heuristic development of a structure-function data space model that determines correlations between genetic information and phenotypic outcomes. For example, NNUGA (Neural Network Using Genetic Algorithms) is an available program (e.g., on the world wide web at cs.bgu.ac.il/˜omri/NNUGA which couples neural networks and genetic algorithms. An introduction to neural networks can be found, e.g., in Kevin Gurney, An Introduction to Neural Networks, UCL Press (1999) and on the world wide web at shef.ac.uk/psychology/gurney/notes/index.html. Additional useful neural network references include those noted above in regard to genetic algorithms and, e.g., Bishop, Neural Networks for Pattern Recognition, Oxford University Press (1995), and Ripley et al., Pattern Recognition and Neural Networks, Cambridge University Press (1995).

[0186] Additional references that are useful in understanding data analysis applications for using and establishing correlations, principle components of an analysis, neural network modeling and the like, include, e.g., Hinchliffe, Modeling Molecular Structures, John Wiley and Sons (1996), Gibas and Jambeck, Bioinformatics Computer Skills, O'Reilly (2001), Pevzner, Computational Molecular Biology and Algorithmic Approach, The MIT Press (2000), Durbin et al., Biological Sequence Analysis: Probabilistic Models of Proteins and Nucleic Acids, Cambridge University Press (1998), and Rashidi and Buehler, Bioinformatic Basics: Applications in Biological Science and Medicine, CRC Press LLC (2000).

[0187] In any case, essentially any statistical test can be applied in a computer implemented model, by standard programming methods, or using any of a variety of “off the shelf” software packages that perform such statistical analyses, including, for example, those noted above and those that are commercially available, e.g., from Partek Incorporated (St. Peters, Mo.; www(dot)partek(dot)com), e.g., that provide software for pattern recognition (e.g., which provide Partek Pro 2000 Pattern Recognition Software) which can be applied to genetic algorithms for multivariate data analysis, interactive visualization, variable selection, neural network & statistical modeling, etc. Relationships can be analyzed, e.g., by Principal Components Analysis (PCA) mapped mapped scatterplots and biplots, Multi-Dimensional Scaling (MDS) Multi-Dimensional Scaling (MDS) mapped scatterplots, star plots, etc. Available software for performing correlation analysis includes SAS, R and MathLab.

[0188] In any case, the marker(s), whether polymorphisms or expression patterns, can be used for any of a variety of genetic analyses. For example, once markers have been identified, as in the present case, they can be used in a number of different assays for association studies. For example, probes can be designed for microarrays that interrogate these markers. Other exemplary assays include, e.g., the Taqman assays and molecular beacon assays described supra, as well as conventional PCR and/or sequencing techniques.

[0189] Additional details regarding association studies can be found in U.S. Pat. No. 6,969,589; U.S. Pat. No. 6,897,025; U.S. Ser. No. 10/286,417, filed Oct. 31, 2002, entitled “Methods for Genomic Analysis;” U.S. Ser. No. 10/768,788, filed Jan. 30, 2004, entitled “Apparatus and Methods for Analyzing and Characterizing Nucleic Acid Sequences;” U.S. Ser. No. 10/447,685, filed May 28, 2003, entitled “Liver Related Disease Compositions and Methods;” U.S. Ser. No. 10/970,761, filed Oct. 20, 2004, entitled “Improved Analysis Methods and Apparatus for Individual Genotyping” (methods for individual genotyping); U.S. Ser. No. 10/956,224, filed Sep. 30, 2004, entitled “Methods for Genetic Analysis;” U.S. Ser. No. 11/172,341, filed Jun. 29, 2005, entitled “Methods for Genomic Analysis;” U.S. Ser. No. 11/344,975, filed Jan. 31, 2006, entitled “Genetic Basis of Alzheimer's Disease and Diagnosis and Treatment Thereof;” and U.S. Ser. No. 11/043,689, filed Jan. 24, 2005, entitled “Associations Using Genotypes and Phenotypes,” and Aguilar-Salinas, et al. (2006) “Design and Validation of a Population-Based Definition of the Metabolic Syndrome” Diabetes Care 29(11):2420-2426.

[0190] In some embodiments, the marker data is used to perform association studies to show correlations between markers and phenotypes. This can be accomplished by determining marker characteristics in individuals with the phenotype of interest (i.e., individuals or populations displaying the phenotype of interest) and comparing the allele frequency or other characteristics (expression levels, etc.) of the markers in these individuals to the allele frequency or other characteristics in a control group of individuals. Such marker determinations can be conducted on a genome-wide basis, or can be focused on specific regions of the genome (e.g., haplotype blocks of interest). In one embodiment, markers that are linked to the genes or loci in Tables 1-14 are assessed for correlation to one or more specific phenotypes.

[0191] In addition to the other embodiments of the methods of the present invention disclosed herein, the methods additionally allow for the “dissection” of a phenotype. That is, a particular phenotype can result from two or more different genetic bases. For example, a metabolic syndrome phenotype in one individual may be the result of “defects” (or simply particular alleles—“defect” with respect to a susceptibility phenotype is context dependent, e.g., whether the phenotype is desirable or undesirable in the individual in a given environment) in a subset of genes in Tables 1-14, while the same basic phenotype in a different individual may be the result of multiple “defects” in a different subset of genes listed in Tables 1-14. Thus, scanning a plurality of markers (e.g., as in genome or haplotype block scanning) allows for the dissection of varying genetic bases for similar (or graduated) phenotypes.

[0192] As described in the previous paragraph, one method of conducting association studies is to compare the allele frequency (or expression level) of markers in individuals with a phenotype of interest (“case group”) to the allele frequency in a control group of individuals. In one method, informative SNPs are used to make the SNP haplotype pattern comparison (an “informative SNP” is genetic SNP marker such as a SNP or subset (more than one) of SNPs in a genome or haplotype block that tends to distinguish one SNP or genome or haplotype pattern from other SNPs, genomes or haplotype patterns; informative SNPs may also be referred to as “tag SNPs”). The approach of using informative SNPs has an advantage over other whole genome scanning or genotyping methods known in the art, for instead of reading all 3 billion bases of each individual's genome—or even reading the 3-4 million common SNPs that may be found-only informative SNPs from a sample population need to be detected. Reading these particular, informative SNPs provides sufficient information to allow statistically accurate association data to be extracted from specific experimental populations, as described above.

[0193] Thus, in an embodiment of one method of determining genetic associations, the allele frequency of informative SNPs is determined for genomes of a control population that do not display the phenotype. The allele frequency of informative SNPs is also determined for genomes of a population that do display the phenotype. The informative SNP allele frequencies are compared. Allele frequency comparisons can be made, for example, by determining the allele frequency (number of instances of a particular allele in a population divided by the total number of alleles) at each informative SNP location in each population and comparing these allele frequencies. The informative SNPs displaying a difference between the allele frequency of occurrence in the control versus case populations/groups are selected for analysis. Once informative SNPs are selected, the SNP haplotype block(s) that contain the informative SNPs are identified, which in turn identifies a genomic region of interest that is correlated with the phenotype. The genomic regions can be analyzed by genetic or any biological methods known in the art e.g., for use as drug discovery targets or as diagnostic markers.

### Systems for Identifying a Metabolic Syndrome Phenotype

[0194] Systems for performing the above correlations are also a feature of the invention. Typically, the system will include system instructions that correlate the presence or absence of an allele (whether detected directly or, e.g., through expression analysis) with a predicted metabolic syndrome, insulin resistance, obesity, high blood pressure, dyslipidemia, diabetes and/or myocardial infarction phenotype. The system instructions can compare detected information as to allele sequence or expression level with a database that includes correlations between the alleles and the relevant phenotypes. As noted above, this database can be multidimensional, thereby including higher-order relationships between combinations of alleles and the relevant phenotypes. These relationships can be stored in any number of look-up tables, e.g., taking the form of spreadsheets (e.g., Excel™ spreadsheets) or databases such as an Access™, SQL™, Oracle™, Paradox™, or similar database. The system includes provisions for inputting sample-specific information regarding allele detection information, e.g., through an automated or user interface and for comparing that information to the look up tables.

[0195] Optionally, the system instructions can also include software that accepts diagnostic information associated with any detected allele information, e.g., a diagnosis that a subject with the relevant allele has a particular phenotype (e.g., a metabolic syndrome phenotype, such as metabolic syndrome, insulin resistance, obesity, high blood pressure, dyslipidemia, diabetes and/or myocardial infarction). This software can be heuristic in nature, using such inputted associations to improve the accuracy of the look up tables and/or interpretation of the look up tables by the system. A variety of such approaches, including neural networks, Markov modeling, and other statistical analysis are described above.

[0196] The invention provides data acquisition modules for detecting one or more detectable genetic marker(s) (e.g., one or more array comprising one or more biomolecular probes, detectors, fluid handlers, or the like). The biomolecular probes of such a data acquisition module can include any that are appropriate for detecting the biological marker, e.g., oligonucleotide probes, proteins, aptamers, antibodies, etc. These can include sample handlers (e.g., fluid handlers), robotics, microfluidic systems, nucleic acid or protein purification modules, arrays (e.g., nucleic acid arrays), detectors, thermocyclers or combinations thereof, e.g., for acquiring samples, diluting or aliquotting samples, purifying marker materials (e.g., nucleic acids or proteins), amplifying marker nucleic acids, detecting amplified marker nucleic acids, and the like.

[0197] For example, automated devices that can be incorporated into the systems herein have been used to assess a variety of biological phenomena, including, e.g., expression levels of genes in response to selected stimuli (Service (1998) “Microchips Arrays Put DNA on the Spot” Science 282:396-399), high throughput DNA genotyping (Zhang et al. (1999) “Automated and Integrated System for High-Throughput DNA Genotyping Directly from Blood” Anal. Chem. 71:1138-1145) and many others. Similarly, integrated systems for performing mixing experiments, DNA amplification, DNA sequencing and the like are also available. See, e.g., Service (1998) “Coming Soon: the Pocket DNA Sequencer” Science 282: 399-401. A variety of automated system components are available, e.g., from Caliper Technologies (Hopkinton, Mass.), which utilize various Zymate systems, which typically include, e.g., robotics and fluid handling modules. Similarly, the common ORCA® robot, which is used in a variety of laboratory systems, e.g., for microtiter tray manipulation, is also commercially available, e.g., from Beckman Coulter, Inc. (Fullerton, Calif.). Similarly, commercially available microfluidic systems that can be used as system components in the present invention include those from Agilent technologies and the Caliper Technologies. Furthermore, the patent and technical literature includes numerous examples of microfluidic systems, including those that can interface directly with microwell plates for automated fluid handling.

[0198] Any of a variety of liquid handling and/or array configurations can be used in the systems herein. One common format for use in the systems herein is a microtiter plate, in which the array or liquid handler includes a microtiter tray. Such trays are commercially available and can be ordered in a variety of well sizes and numbers of wells per tray, as well as with any of a variety of functionalized surfaces for binding of assay or array components. Common trays include the ubiquitous 96 well plate, with 384 and 1536 well plates also in common use. Samples can be processed in such trays, with all of the processing steps being performed in the trays. Samples can also be processed in microfluidic apparatus, or combinations of microtiter and microfluidic apparatus.

[0199] In addition to liquid phase arrays, components can be stored in or analyzed on solid phase arrays. These arrays fix materials in a spatially accessible pattern (e.g., a grid of rows and columns) onto a solid substrate such as a membrane (e.g., nylon or nitrocellulose), a polymer or ceramic surface, a glass or modified silica surface, a metal surface, or the like. Components can be accessed, e.g., by hybridization, by local rehydration (e.g., using a pipette or other fluid handling element) and fluidic transfer, or by scraping the array or cutting out sites of interest on the array.

[0200] The system can also include detection apparatus that is used to detect allele information, using any of the approached noted herein. For example, a detector configured to detect real-time PCR products (e.g., a light detector, such as a fluorescence detector) or an array reader can be incorporated into the system. For example, the detector can be configured to detect a light emission from a hybridization or amplification reaction comprising an allele of interest, wherein the light emission is indicative of the presence or absence of the allele. Optionally, an operable linkage between the detector and a computer that comprises the system instructions noted above is provided, allowing for automatic input of detected allele-specific information to the computer, which can, e.g., store the database information and/or execute the system instructions to compare the detected allele specific information to the look up table.

[0201] Probes that are used to generate information detected by the detector can also be incorporated within the system, along with any other hardware or software for using the probes to detect the amplicon. These can include thermocycler elements (e.g., for performing PCR or LCR amplification of the allele to be detected by the probes), arrays upon which the probes are arrayed and/or hybridized, or the like. The fluid handling elements noted above for processing samples, can be used for moving sample materials (e.g., template nucleic acids and/or proteins to be detected) primers, probes, amplicons, or the like into contact with one another. For example, the system can include a set of marker probes or primers configured to detect at least one allele of one or more genes or linked loci associated with a metabolic syndrome, insulin resistance, obesity, high blood pressure, dyslipidemia, diabetes and/or myocardial infarction phenotype, such as those listed in Tables 1-14. The detector module is configured to detect one or more signal outputs from the set of marker probes or primers, or an amplicon produced from the set of marker probes or primers, thereby identifying the presence or absence of the allele.

[0202] The sample to be analyzed is optionally part of the system, or can be considered separate from it. The sample optionally includes e.g., genomic DNA, amplified genomic DNA, cDNA, amplified cDNA, RNA, amplified RNA, proteins, etc., as noted herein. In one aspect, the sample is derived from a mammal such as a human patient.

[0203] Optionally, system components for interfacing with a user are provided. For example, the systems can include a user viewable display for viewing an output of computer-implemented system instructions, user input devices (e.g., keyboards or pointing devices such as a mouse) for inputting user commands and activating the system, etc. Typically, the system of interest includes a computer, wherein the various computer-implemented system instructions are embodied in computer software, e.g., stored on computer readable media.

[0204] Standard desktop applications such as word processing software (e.g., Microsoft Word™ or Corel WordPerfect™) and database software (e.g., spreadsheet software such as Microsoft Excel™, Corel Quattro PrO™, or database programs such as Microsoft Access™ or Sequel™, Oracle™, Paradox™) can be adapted to the present invention by inputting a character string corresponding to an allele herein, or an association between an allele and a phenotype. For example, the systems can include software having the appropriate character string information, e.g., used in conjunction with a user interface (e.g., a GUI in a standard operating system such as a Windows, Macintosh or LINUX system) to manipulate strings of characters. Specialized sequence alignment programs such as BLAST can also be incorporated into the systems of the invention for alignment of nucleic acids or proteins (or corresponding character strings) e.g., for identifying and relating alleles.

[0205] As noted, systems can include a computer with an appropriate database and an allele sequence or correlation of the invention. Software for aligning sequences, as well as data sets entered into the software system comprising any of the sequences herein can be a feature of the invention. The computer can be, e.g., a PC (Intel x86 or Pentium chip-compatible DOS™, OS2™ WINDOWS™ WINDOWS NT™, WINDOWS95™, WINDOWS98™, WINDOWS2000, WINDOWSME, or LINUX based machine, a MACINTOSH™, Power PC, or a UNIX based (e.g., SUN™ work station or LINUX based machine) or other commercially common computer which is known to one of skill. Software for entering and aligning or otherwise manipulating sequences is available, e.g., BLASTP and BLASTN, or can easily be constructed by one of skill using a standard programming language such as Visualbasic, Fortran, Basic, Java, or the like.

### Methods of Identifying Modulators of Metabolic Syndrome Phenotypes

[0206] In addition to providing various diagnostic and prognostic markers for identifying metabolic syndrome phenotypes, the invention also provides methods of identifying modulators of metabolic syndrome, insulin resistance, obesity, high blood pressure, dyslipidemia, diabetes and/or myocardial infarction phenotype. In the methods, a potential modulator is contacted to a relevant protein (such as those encoded by the genes or loci in Tables 1-14, 17 and 18) or to a nucleic acid that encodes such a protein. An effect of the potential modulator on the gene or gene product is detected, thereby identifying whether the potential modulator modulates the underlying molecular basis for the metabolic syndrome, insulin resistance, obesity, high blood pressure, dyslipidemia, diabetes and/or myocardial infarction phenotype.

[0207] In addition, the methods can include, e.g., administering one or more putative modulator to an individual that displays a relevant phenotype and determining whether the putative modulator modulates the phenotype in the individual, e.g., in the context of a clinical trial or treatment. This, in turn, determines whether the putative modulator is clinically useful.

[0208] The gene or gene product that is contacted by the modulator can include any allelic form noted herein. Allelic forms, whether genes or proteins, that positively correlate to undesirable metabolic syndrome, insulin resistance, obesity, high blood pressure, dyslipidemia, diabetes and/or myocardial infarction phenotypes are preferred targets for modulator screening.

[0209] Effects of interest that can be screened for include: (a) increased or decreased expression of products of the genes listed in Tables 1-14, 17 and 18 in the presence of the modulator; (b) a change in the timing or location of expression of the genes listed in Tables 1-14, 17, and 18, and/or products thereof, in the presence of the modulator; (c) a change in localization of the proteins encoded by the genes or loci of Tables 1-14, 17 and 18 in the presence of the modulator.

[0210] The precise format of the modulator screen will, of course, vary, depending on the effect(s) being detected and the equipment available. Northern analysis, quantitative RT-PCR and/or array-based detection formats can be used to distinguish expression levels of genes noted above. Protein expression levels can also be detected using available methods, such as western blotting, ELISA analysis, antibody hybridization, BIAcore, or the like. Any of these methods can be used to distinguish changes in expression levels of the genes of Tables 1-14, 17. and 18, and/or products thereof, that result from a potential modulator.

[0211] Accordingly, one may screen for potential modulators of the genes listed in Tables 1-14, 17 and 18, or products thereof, for activity or expression. For example, potential modulators (small molecules, organic molecules, inorganic molecules, proteins, hormones, transcription factors, or the like) can be contacted to a cell comprising an allele of interest and an effect on activity or expression (or both) of products of the genes listed in Tables 1-14, 17 and 18, can be detected. For example, expression can be detected, e.g., via northern analysis or quantitative (optionally real time) RT-PCR, before and after application of potential expression modulators. Similarly, promoter regions of the various genes (e.g., generally sequences in the region of the start site of transcription, e.g., within 5 KB of the start site, e.g., 1 KB, or less e.g., within 500BP or 250BP or 100 BP of the start site) can be coupled to reporter constructs (CAT, beta-galactosidase, luciferase or any other available reporter) and can be similarly be tested for expression activity modulation by the potential modulator. In either case, the assays can be performed in a high-throughput fashion, e.g., using automated fluid handling and/or detection systems, in serial or parallel fashion. Similarly, activity modulators can be tested by contacting a potential modulator to an appropriate cell using any of the activity detection methods herein, regardless of whether the activity that is detected is the result of activity modulation, expression modulation or both. These assays can be in vitro, cell-based, or can be screens for modulator activity performed on laboratory animals such as knock-out transgenic mice comprising a gene of interest.

[0212] Biosensors for detecting modulator activity detection are also a feature of the invention. These include devices or systems that comprise a protein product of a gene or locus of Tables 1-14, 17 and 18 coupled to a readout that measures or displays one or more activity of the protein. Thus, any of the above described assay components can be configured as a biosensor by operably coupling the appropriate assay components to a readout. The readout can be optical (e.g., to detect cell markers or cell survival) electrical (e.g., coupled to a FET, a BIAcore, or any of a variety of others), spectrographic, or the like, and can optionally include a user-viewable display (e.g., a CRT or optical viewing station). The biosensor can be coupled to robotics or other automation, e.g., microfluidic systems, that direct contact of the putative modulators to the proteins of the invention, e.g., for automated high-throughput analysis of putative modulator activity. A large variety of automated systems that can be adapted to use with the biosensors of the invention are commercially available. For example, automated systems have been made to assess a variety of biological phenomena, including, e.g., expression levels of genes in response to selected stimuli (Service (1998) “Microchips Arrays Put DNA on the Spot” Science 282:396-399). Laboratory systems can also perform, e.g., repetitive fluid handling operations (e.g., pipetting) for transferring material to or from reagent storage systems that comprise arrays, such as microtiter trays or other chip trays, which are used as basic container elements for a variety of automated laboratory methods. Similarly, the systems manipulate, e.g., microtiter trays and control a variety of environmental conditions such as temperature, exposure to light or air, and the like. Many such automated systems are commercially available and are described herein, including those described above. These include various Zymate systems, ORCA® robots, microfluidic devices, etc. For example, the LabMicrofluidic Device® high throughput screening system (HTS) by Caliper Technologies, Mountain View, Calif. can be adapted for use in the present invention to screen for modulator activity.

[0213] In general, methods and sensors for detecting protein expression level and activity are available, including those taught in the various references above, including R. Scopes, Protein Purification, Springer-Verlag, N.Y. (1982); Deutscher, Methods in Enzymology Vol. 182: Guide to Protein Purification, Academic Press, Inc. N.Y. (1990); Sandana (1997) Bioseparation of Proteins, Academic Press, Inc.; Bollag et al. (1996) Protein Methods, 2^{nd} Edition Wiley-Liss, NY; Walker (1996) The Protein Protocols Handbook Humana Press, NJ, Harris and Angal (1990) Protein Purification Applications: A Practical Approach IRL Press at Oxford, Oxford, England; Harris and Angal Protein Purification Methods: A Practical Approach IRL Press at Oxford, Oxford, England; Scopes (1993) Protein Purification: Principles and Practice 3^{rd} Edition Springer Verlag, NY; Janson and Ryden (1998) Protein Purification: Principles, High Resolution Methods and Applications, Second Edition Wiley-VCH, NY; and Walker (1998) Protein Protocols on CD-ROM Humana Press, NJ; and Satinder Ahuja ed., Handbook of Bioseparations, Academic Press (2000). “Proteomic” detection methods, which detect many proteins simultaneously have been described and are also noted above, including various multidimensional electrophoresis methods (e.g., 2-d gel electrophoresis), mass spectrometry based methods (e.g., SELDI, MALDI, electrospray, etc.), or surface plasmon reasonance methods. These can also be used to track protein activity and/or expression level.

[0214] Similarly, nucleic acid expression levels (e.g., mRNA) can be detected using any available method, including northern analysis, quantitative RT-PCR, or the like. References sufficient to guide one of skill through these methods are readily available, including Ausubel, Sambrook and Berger.

[0215] Whole animal assays can also be used to assess the effects of modulators on cells or whole animals (e.g., transgenic knock-out mice), e.g., by monitoring an effect on a cell-based phenomenon, a change in displayed animal phenotype, or the like.

[0216] Potential modulator libraries to be screened for effects on the genes or loci of Tables 1-14, 17, 18, or product thereof. These libraries can be random, or can be targeted.

[0217] Targeted libraries include those designed using any form of a rational design technique that selects scaffolds or building blocks to generate combinatorial libraries. These techniques include a number of methods for the design and combinatorial synthesis of target-focused libraries, including morphing with bioisosteric transformations, analysis of target-specific privileged structures, and the like. In general, where information regarding structure of products of the genes or loci of Tables 1-14, 17 18, is available, likely binding partners can be designed, e.g., using flexible docking approaches, or the like. Similarly, random libraries exist for a variety of basic chemical scaffolds. In either case, many thousands of scaffolds and building blocks for chemical libraries are available, including those with polypeptide, nucleic acid, carbohydrate, and other backbones. Commercially available libraries and library design services include those offered by Chemical Diversity (San Diego, Calif.), Affymetrix (Santa Clara, Calif.), Sigma (St. Louis Mo.), ChemBridge Research Laboratories (San Diego, Calif.), TimTec (Newark, Del.), Nuevolution A/S (Copenhagen, Denmark) and many others.

[0218] Kits for treatment of a metabolic syndrome, insulin resistance, obesity, high blood pressure, dyslipidemia, diabetes and/or myocardial infarction phenotype can include a modulator identified as noted above and instructions for administering the compound to a patient to treat treatment metabolic syndrome, insulin resistance, obesity, high blood pressure, dyslipidemia, diabetes and/or myocardial infarction.

### Cell Rescue and Therapeutic Administration

[0219] In one aspect, the invention includes rescue of a cell that is defective in function of one or more endogenous genes or polypeptides encoded by the genes or loci of Tables 1-14, 17 and 18 (thus conferring the relevant phenotype of interest, e.g., metabolic syndrome, insulin resistance, obesity, high blood pressure, dyslipidemia, diabetes and/or myocardial infarction, etc.). This can be accomplished simply by introducing a new copy of the gene (or a heterologous nucleic acid that expresses the relevant protein), i.e., a gene having an allele that is desired, into the cell. Other approaches, such as homologous recombination to repair the defective gene (e.g., via chimeraplasty) can also be performed. In any event, rescue of function can be measured, e.g., in any of the assays noted herein. Indeed, this method can be used as a general method of screening cells in vitro for expression or activity of any gene or gene product of Tables 1-14, 17 or 18. Accordingly, in vitro rescue of function is useful in this context for the myriad in vitro screening methods noted above. The cells that are rescued can include cells in culture, (including primary or secondary cell culture from patients, as well as cultures of well-established cells). Where the cells are isolated from a patient, this has additional diagnostic utility in establishing which sequence of Tables 1-14, 17 or 18 is defective in a patient that presents with a relevant phenotype.

[0220] In another aspect, the cell rescue occurs in a patient, e.g., a human or veterinary patient, e.g., to remedy a metabolic defect. Thus, one aspect of the invention is gene therapy to remedy metabolic defects (or even simply to enhance metabolic phenotypes), in human or veterinary applications. In these applications, the nucleic acids of the invention are optionally cloned into appropriate gene therapy vectors (and/or are simply delivered as naked or liposome-conjugated nucleic acids), which are then delivered, optionally in combination with appropriate carriers or delivery agents. Proteins can also be delivered directly, but delivery of the nucleic acid is typically preferred in applications where stable expression is desired. Similarly, modulators of any metabolic defect that are identified by the methods herein can be used therapeutically.

[0221] Compositions for administration, e.g., comprise a therapeutically effective amount of the modulator, gene therapy vector or other relevant nucleic acid, and a pharmaceutically acceptable carrier or excipient. Such a carrier or excipient includes, but is not limited to, saline, buffered saline, dextrose, water, glycerol, ethanol, and/or combinations thereof. The formulation is made to suit the mode of administration. In general, methods of administering gene therapy vectors for topical use are well known in the art and can be applied to administration of the nucleic acids of the invention.

[0222] Therapeutic compositions comprising one or more modulator or gene therapy nucleic acid of the invention are optionally tested in one or more appropriate in vitro and/or in vivo animal model of disease, to confirm efficacy, tissue metabolism, and to estimate dosages, according to methods well known in the art. In particular, dosages can initially be determined by activity, stability or other suitable measures of the formulation.

[0223] Administration is by any of the routes normally used for introducing a molecule into ultimate contact with cells. Modulators of and/or nucleic acids that encode the genes and loci of Tables 1-14, 17 or 18 can be administered in any suitable manner, optionally with one or more pharmaceutically acceptable carriers. Suitable methods of administering such nucleic acids in the context of the present invention to a patient are available, and, although more than one route can be used to administer a particular composition, a particular route can often provide a more immediate and more effective action or reaction than another route.

[0224] Pharmaceutically acceptable carriers are determined in part by the particular composition being administered, as well as by the particular method used to administer the composition. Accordingly, there is a wide variety of suitable formulations of pharmaceutical compositions of the present invention. Compositions can be administered by a number of routes including, but not limited to: oral, intravenous, intraperitoneal, intramuscular, transdermal, subcutaneous, topical, sublingual, or rectal administration. Compositions can be administered via liposomes (e.g., topically), or via topical delivery of naked DNA or viral vectors. Such administration routes and appropriate formulations are generally known to those of skill in the art.

[0225] The compositions, alone or in combination with other suitable components, can also be made into aerosol formulations (i.e., they can be “nebulized”) to be administered via inhalation. Aerosol formulations can be placed into pressurized acceptable propellants, such as dichlorodifluoromethane, propane, nitrogen, and the like. Formulations suitable for parenteral administration, such as, for example, by intraarticular (in the joints), intravenous, intramuscular, intradermal, intraperitoneal, and subcutaneous routes, include aqueous and non-aqueous, isotonic sterile injection solutions, which can contain antioxidants, buffers, bacteriostats, and solutes that render the formulation isotonic with the blood of the intended recipient, and aqueous and non-aqueous sterile suspensions that can include suspending agents, solubilizers, thickening agents, stabilizers, and preservatives. The formulations of packaged nucleic acid can be presented in unit-dose or multi-dose sealed containers, such as ampules and vials.

[0226] The dose administered to a patient, in the context of the present invention, is sufficient to effect a beneficial therapeutic response in the patient over time. The dose is determined by the efficacy of the particular vector, or other formulation, and the activity, stability or serum half-life of the polypeptide which is expressed, and the condition of the patient, as well as the body weight or surface area of the patient to be treated. The size of the dose is also determined by the existence, nature, and extent of any adverse side-effects that accompany the administration of a particular vector, formulation, or the like in a particular patient. In determining the effective amount of the vector or formulation to be administered in the treatment of disease, the physician evaluates local expression, or circulating plasma levels, formulation toxicities, progression of the relevant disease, and/or where relevant, the production of antibodies to proteins encoded by the polynucleotides. The dose administered, e.g., to a 70 kilogram patient are typically in the range equivalent to dosages of currently-used therapeutic proteins, adjusted for the altered activity or serum half-life of the relevant composition. The vectors of this invention can supplement treatment conditions by any known conventional therapy.

[0227] For administration, formulations of the present invention are administered at a rate determined by the LD-50 of the relevant formulation, and/or observation of any side-effects of the vectors of the invention at various concentrations, e.g., as applied to the mass or topical delivery area and overall health of the patient. Administration can be accomplished via single or divided doses.

[0228] If a patient undergoing treatment develops fevers, chills, or muscle aches, he/she receives the appropriate dose of aspirin, ibuprofen, acetaminophen or other pain/fever controlling drug. Patients who experience reactions to the compositions, such as fever, muscle aches, and chills are premedicated 30 minutes prior to the future infusions with either aspirin, acetaminophen, or, e.g., diphenhydramine. Meperidine is used for more severe chills and muscle aches that do not quickly respond to antipyretics and antihistamines. Treatment is slowed or discontinued depending upon the severity of the reaction.

### EXAMPLES

[0229] The following examples illustrate, but do not limit the invention. One of skill will recognize a variety of non-critical parameters that can be modified to achieve essentially similar results.

### Example 1

[0230] The entire human genome was scanned to identify common polymorphisms using microarray technology platforms as described in U.S. Ser. No. 10/106,097, entitled “Methods for Genomic Analysis”, filed on Mar. 26, 2002, assigned to the same assignee as the present application; U.S. Ser. No. 10/284,444, entitled “Chromosome 21 SNPs, SNP Groups and SNP Patterns,” filed on Oct. 31, 2002, assigned to the same assignee as the present application; and 10/042,819, entitled “Whole Genome Scanning,” filed on Jan. 7, 2002, assigned to the same assignee as the present application, all of which are incorporated herein by reference. The microarrays are manufactured using a process adapted from semiconductor manufacturing to achieve cost effectiveness and high quality.

### Example 2

[0231] Polymorphisms identified in Example 1 were grouped into haplotype blocks and haplotype patterns using methods disclosed in U.S. Ser. Nos. 10/106,097, entitled “Methods for Genomic Analysis”, filed Mar. 26, 2002 (Attorney Docket 200/1005-10), incorporated herein by reference. Representative polymorphisms, haplotype blocks and haplotype patterns from an entire human chromosome (chromosome 21) are disclosed in, for example, Patil, N. et al, “Blocks of Limited Haplotype Diversity Revealed by High-Resolution Scanning of Human Chromosome 21” Science 294, 1719-1723 (2001) and the associated supplemental materials, incorporated herein by reference.

### Example 3

[0232] DNA from each individual in the case (individuals who display a metabolic syndrome phenotype) and control (individuals who do not display the metabolic syndrome phenotype) groups was purified by methods well known in the art. DNA was isolated from human blood using QIAGEN's PAXGene kit (part # 761115), quantified the purified DNA using PicoGreen and the TECAN SpectraFluor Plus plate reader. Each DNA sample was subjected to a “normalization” procedure to equilibrate the DNA concentrations of each DNA sample, and the normalized DNA was subsequently quantified using the same PicoGreen/TECAN procedure as was used to quantify the pre-normalization DNA.

### Example 4

[0233] The DNA samples were amplified using short-range PCR. Methods for short-range PCR are disclosed, for example, in U.S. patent application Ser. No. 10/341,832, filed Jan. 14, 2003, entitled “Apparatus and Methods for Selection PCR Primer Pairs.” Briefly, the PCRs were performed in 384-well plates containing primer pairs to which short-range PCR reaction buffer, 15 ng sample DNA template, dNTPs, and TITANIUM™ Taq DNA polymerase (Clontech Laboratories, Inc., Mountain View, Calif.) were added in a total volume of 6 μl. The PCR plates were sealed prior to PCR. The thermocycler program used for the PCR is identified in Table 15:

TABLE 15

| Step | Action |
|---|---|
| 1 | Incubate at 96° C. for 5 min |
| 2 | Incubate at 96° C. for 2 seconds |
| 3 | Incubate at 53° C. for 2 minutes |
| 4 | Go to [step] “2” (for 55 subsequent cycles) |
| 5 | Incubate at 50° C. for 5 minutes |
| 6 | Hold at 4° C. (or at −20° C. if the plates are to |
| | be stored for more than a week |

### Example 5

[0234] PCR products (4 μl of each) were pooled into 96 deep well plates such that each well of the 96 deep well plates contained PCR products from 48 different PCR reactions. The pooled PCR products were treated with shrimp alkaline phosphatase (SAP) at 37° C. for 30 minutes. The reactions were subsequently heated to 80° C. for 20 minutes before cooling to 4° C. The completed reactions were stored at −20° C.

[0235] The SAP-treated PCR products were then purified using a vacuum filter apparatus. The products were transferred to a 3K vacuum filter plate, which was placed on the vacuum manifold of the vacuum filter apparatus. Vacuum was applied to the filter plate at >20 cm Hg until all the samples were dried. To resuspend the PCR products, 60 μl of molecular biology grade water was added to each well of each filter plate and the filter plates were incubated for at least 30 minutes at room temperature. The plates were vortexed at low speed for one minute every 5 minutes. Optionally, the plates were incubated overnight at 4° C. to increase recovery of the PCR product. Subsequently, for each well in the filter plate, the water previously added was used to wash the filter membrane three times before transferring the purified PCR product to a well of a new multiwell plate.

[0236] To quantitate the purified PCR product, 4 μl of the purified PCR product was added to 196 μl of water in a well in a quantification plate. The quantification plate was read using a TECAN plate reader, which provides an optical density reading for each purified PCR product, from which the concentration of the purified PCR product was computed.

### Example 6

[0237] The purified PCR products were labeled with biotin in a thermocycler. In each well of a multiwell plate, 0.5 μg of purified PCR product was added to 3 μl labeling buffer, 0.5 μl of 400 U/μl TdT, and 1 μl of 0.5 mM biotin mix (ddUTP/dUTP) in a final volume of 35 μl. The labeling buffer contained 100 mM Tris-acetate (pH 7.5), 100 mM magnesium acetate, and 500 mM potassium acetate. The DNA labeling conditions are as follows: 37° C. for 90 minutes, followed by 99° C. for 10 minutes and finally holding at 4° C.

### Example 7

[0238] The labeled PCR products were applied to microarrays containing oligonucleotides complementary to the genomic DNA that was amplified. Both strands of the labeled PCR product were probed for polymorphisms using microarray oligonucleotide probes. Since there are generally two alleles for a given polymorphic locus, the microarray contained both alleles of the complementary oligonucleotides at each polymorphic position so that the labeled DNA could be screened for both alleles of a given polymorphism simultaneously. Minor allele frequencies that varied significantly between the case group and control group were characterized as being associated with related disease. Results were verified by genotyping additional independent samples for polymorphisms that were potentially associated with the case or control group based on the initial analysis.

[0239] Prior to application to a microarray, 5 μl of herring sperm DNA (10 mg/ml) and 24 μl of 40% formamide were added to each well containing labeled PCR product. The plates were sealed, briefly vortexed, and spun down at 1,000 rpm for 15 seconds. The plates were placed into a thermocycler and the following program was run: 99° C. for 10 minutes, followed by a 65° C. soak for no more than 5 minutes. When denaturation was complete, prewarmed hybridization buffer was added to each well, and the plates were sealed and kept at 65° C. until the samples were transferred to the microarrays. The hybridization solution contains 60 μl of 5M TMACL, 1 μl of Tris pH 7.8 (or 8.0), 1 μl of 1% Triton X-100, 1 μl of 5 nM b-948 control oligo, and 1 μl of 10 mg/ml herring sperm DNA. A total of 120 μl of the denatured PCR product was transferred to a microarray that had been warmed at 50° C. for 30 minutes. The microarray containing the denatured PCR product was placed in a 50° C. hybridization oven where it was rotated at 20 r.p.m. for 16 (+3) hours such that the pooled sample was allowed to flow freely over the microarray during the incubation.

### Example 8

[0240] After incubation (i.e., hybridization), the microarray was removed from the hybridization oven and the sample was removed and stored at −20° C. Then, the microarray was placed into a flow-cell and washed two times with 15 ml of 1×MES. The microarray was inverted several times to ensure that the wash solution moved freely over the surface of the microarray prior to removing the wash solution. Finally, the flow-cell was filled with a third 15 ml aliquot of 1×MES.

[0241] The microarray was stained with sequential treatments with three different stain solutions for 20-30 minutes each, with each stain treatment separated by a wash step. The three stain solutions were as follows. Stain 1 consisted of 13.8 ml of 1×MES/0.1% Triton X-100, 2.0 ml of acetylated BSA (20 mg/ml stock solution), and 80 μl of streptavidin stock protein (1 mg/ml stock solution). Stain 2 consisted of 14.0 ml of 1×MES/0.1% Triton X-100, 2.0 ml of acetylated BSA (20 mg/ml stock solution), and 40 μl of biotinylated anti-streptavidin antibody (0.5 mg/ml stock solution). Stain 3 consisted of 13.8 ml of 1×MES/0.1% Triton X-100, 2.0 ml of acetylated BSA (20 mg/ml stock solution), and 80 μl of streptavidin Cy-chrome stock protein (0.2 mg/ml stock solution).

[0242] Staining with the three stain solutions was followed with a post-stain high stringency wash. Solutions of 6×SSPE and 0.2×SSPE were prewarmed to 37° C. The 1×MES was removed from the microarray and the microarray was rinsed once with ˜15 ml of prewarmed 6×SSPE. The microarray was inverted several times to ensure that the 6×SSPE moved freely over the surface of the microarray before it was removed. The 6×SSPE wash was removed and fresh 6×SSPE was added to the wafer. The wafer was incubated at 37° C. for 30 minutes, and the 6×SSPE was subsequently removed. The microarray was rinsed three times with prewarmed 0.2×SSPE, before being filled with fresh prewarmed 0.2×SSPE and placed in a 37° C. convection oven for 45 minutes. The 0.2×SSPE was removed and room temperature 1×MES was added to the microarray. The microarray was then inverted several times before the 1×MES was removed. The 1×MES wash was repeated once. Finally, fresh 1×MES was added to the microarray, which was wrapped in foil prior to storage at 4° C. or scanning of the microarray.

### Example 9

[0243] On the same days the microarrays were stained and washed, they were scanned using an arc scanner. After scanning, the microarrays were removed from the scanner, wrapped in foil and stored at 4° C. The scan files generated by the scanner were then analyzed by software programs designed to interpret intensity data from microarrays. This software allowed discrimination of hybridization patterns that distinguished the case pools from the control pools. The data were analyzed according to the methods disclosed in the following U.S. patent applications, all of which are assigned to the assignee of the present application: U.S. patent application Ser. No. 10/970,761, filed Oct. 20, 2004, entitled “Analysis Methods and Apparatus for Individual Genotyping”; and U.S. patent application Ser. No. 11/173,809, filed Jul. 1, 2005, entitled “Algorithm for Estimating Accuracy of Genotype Assignment”.

### Example 10

[0244] This Example relates to a whole genome association and replication analysis for 14 metabolic syndrome phenotypes, including metabolic syndrome (Table 1), diabetes (Table 2), myocardial infarction (Table 3), hypertension (Table 4), body mass index (a measure of obesity) (Table 5), waist circumference (a measure of obesity) (Table 6), diastolic blood pressure (Table 7), systolic blood pressure (Table 8), HDL cholesterol (Table 9), triglycerides levels (Table 10), insulin levels (Tables 11 and 12), and homeostasis analysis (The Homeostasis Model Assessment (HOMA) estimates steady state beta cell function and insulin sensitivity as percentages of a normal reference population) (Tables 13 and 14).

### Overview

[0245] Metabolic syndrome is a combination of medical disorders that affect a large number of people in a clustered fashion. According to the statistics, the prevalence in the USA is calculated as being up to 25% of the population [American Heart Association. Metabolic Syndrome—Statistics. Available from: www(dot)americanheart(dot)org/downloadable/heart/1081492779297FS15META4(dot)pdf], the end result of which is to increase one's risk for cardiovascular disease and diabetes. It is characterized by a group of metabolic risk factors in one person. These factors in general include: (1) Abdominal obesity (excessive fat tissue in and around the abdomen); (2) Atherogenic dyslipidemia (blood fat disorders—elevated triglycerides, reduced HDL cholesterol and high LDL cholesterol—that foster plaque buildups in artery walls); (3) Elevated blood pressure; and (4) Insulin resistance or glucose intolerance (the body can't properly use insulin or blood sugar). The causes of metabolic syndrome are extremely complex and remain mostly unknown. To elucidate the genetic contribution to this medical disorder, a two-stage whole-genome genetic association and replication study was carried out with the goal of identifying and validating genetic determinants of metabolic syndrome and the various related metabolic syndrome phenotypes.

### Study Design

[0246] This multi-stage study was designed to discover and validate the genetic associations with metabolic syndrome or any of its components, or “metabolic syndrome phenotypes.” The DNA samples used in the study were collected from multiple sources. The genotyping strategy included 3 stages of SNP selection, with individuals from 3 populations ((Europeans, Indian Asians and Mexicans). In Phase I, genome-wide association scans were performed in 1005 European men and 1006 Indian Asian men from the London Life Sciences Population (LOLIPOP) study, UK. In Phase II, 1822 SNPs were genotyped in 859 UK European women, 1181 UK Indian Asian women, 968 Mexican men and 1560 Mexican women. In the final, third stage (Phase III) 32 SNPs were validated in 5968 European male and female subjects. Collection of each cohort was approved by the relevant Institutional Ethics Committees, and all subjects gave written informed consent.

[0247] European and Indian Asian Subjects Genotyped in Phases I and II

[0248] LOLIPOP is a cohort study of cardiovascular health in men and women registered with family practitioners in West London, recruited with a response rate of 62%. Characteristics of subjects are shown in Tables S1 and S2. Europeans were recruited if all 4 grandparents were born in the UK; Indian Asians if all 4 grandparents were born in the Indian Subcontinent. The assessment of participants was carried out by trained research nurses according to a standardized protocol. An interviewer-administered questionnaire was used to collect data on medical history, family history, current prescribed medication (verified from the practice computerized records), cardiovascular risk factors, and alcohol intake. Country of birth of participants, parents, and grandparents were recorded together with language and religion for assignment of ethnic subgroups.

[0249] Mexican Subjects Genotyped in Phase II

[0250] Mexican men and women were recruited by the Instituto Nacional de Ciencias Medicas y Nutrición in Mexico City, Mexico. Subjects were identified from outpatient lipid, internal medicine, diabetes, thyroid, irritable bowel, and osteoarthritis clinics, and from local factories. Characteristics of the genotyped subjects are shown in Table S2.

[0251] Europeans Genotyped in Phase III

[0252] Subjects were recruited as part of the TNT study (LaRosa, J. C. et al., N. Engl. J. Med. 352, 1425-35 (2005)), and consisted of males and females between 35 and 75 years of age, who had clinically evident CHD. CHD was defined here as having previous myocardial infarction, previous or current angina with objective evidence of atherosclerotic CHD, or a history of coronary revascularization. Characteristics of genotyped subjects are shown in Table S3.

[0253] Case/Control Criteria

[0254] The case status for metabolic syndrome (Table 1) was defined using the ATP III (Adult Treatment Panel III) of the NCEP (National Cholesterol Education Program) (2001, 2005) definition of metabolic syndrome [Expert Panel on Detection, Evaluation, and Treatment of High Blood Cholesterol in Adults. Executive Summary of The Third Report of The National Cholesterol Education Program (NCEP) Expert Panel on Detection, Evaluation, And Treatment of High Blood Cholesterol In Adults (Adult Treatment Panel III). JAMA 2001; 285: 2486-97; Grundy S M, et al. (2005) Diagnosis and Management of the Metabolic Syndrome. An American Heart Association/National Heart, Lung, and Blood Institute Scientific Statement. Arterioscler Thromb Vasc Biol. 25: 2243-2244] i.e. individuals with three or more of the following:

[0255] Central/abdominal obesity as measured by waist circumference [Men—Greater than 40 inches (102 cm); Women—Greater than 35 inches (88 cm)]

[0256] Fasting triglycerides greater than or equal to 150 mg/dL (1.69 mmol/L)

[0257] HDL cholesterol [Men—Less than 40 mg/dL (1.04 mmol/L); Women—Less than 50 mg/dL (1.29 mmol/L)]

[0258] Blood pressure greater than or equal to 130/85 mm Hg or on antihypertensive medications.

[0259] Fasting glucose greater than or equal to 110 mg/dL (6.1 mmol/L).

[0260] Controls were defined as those who do not meet the above criteria. These same criteria were used to independently determine case/control status for other metabolic syndrome phenotypes. Specifically, the case status for waist circumference (Table 6) for men was greater than 40 inches, and for women it was greater than 35 inches; the case status for triglycerides (Table 10) was a fasting triglyceride level greater than or equal to 150 mg/dL; the case status for HDL cholesterol (Table 9) for men was less than 40 mg/dL and for women it was less than 50 mg/dL; the case status for systolic blood pressure (Table 8) was a measure greater than or equal to 130 mm Hg; the case status for diastolic blood pressure (Table 7) was a measure greater than or equal to 85 mm Hg; and the case status for hypertension (Table 4) was a blood pressure measure greater than or equal to 130/85 mm Hg or the patient currently being prescribed an antihypertensive medication. Controls were defined as those who do not meet the above criteria for these metabolic syndrome phenotypes.

[0261] In addition, the case status for diabetes (Table 2) was a fasting plasma glucose level greater than or equal to 126 mg/dL; the case status for myocardial infarction (Table 3) was a previous incidence of a myocardial infarction; and the case status for body mass index (BMI) (Table 5) was a BMI measure of greater than 30 kg/m². Two additional metabolic syndrome phenotypes were related to insulin level and HOMA measurement. Case/control status for the insulin level phenotype (Tables 11 and 12) was determined using linear regression modeling to fit the reference allele defined phenotype measurement curve. The significance testing was based on the co-efficient of the SNP, and this significance testing was used to divide the populations into case and control groups. For the HOMA score phenotype (Tables 13 and 14), case/control status was determined as previously described (Wallace, et al. (2004) Diabetes Care 27(6): 1487-95). (The HOMA score estimates steady state beta cell function (% B) and insulin sensitivity (% S) as percentages of a normal reference population, and serves as a measure of insulin sensitivity.) For both of these phenotypes, the analyses were performed twice for two different populations. The first analysis compared case and control individuals, all of whom were not diagnosed as diabetic (so diabetics were excluded from this analysis) (Tables 11 and 13). The second analysis compared case and control individuals, all of whom were not Mexican (so the Mexican populations were excluded from this analysis) (Tables 12 and 14).

### Genotyping

[0262] Sample Preparation

[0263] Whole-genome amplification was performed on samples with less than 35 μg genomic DNA as described elsewhere (Bacann et al., Am. J. Hum. Genet. 66, 1933-1944 (2000)). Multiplex PCR reactions were set up as follows (per reaction): 10 ng of genomic DNA was amplified using ˜220-plex PCR primer pairs (0.1 μM of each primer), 3.25 mM dNTPs, 12.5× Titanium Taq (Clontech), 0.19M Tricine, 3.35× MasterAmp PCR Enhancer with Betaine (Epicentre Biotechnologies), 0.235% DMSO, 0.3M KCl, 0.37M Trizma, 0.1 M (NH₄)₂SO₄, and 0.02M MgCl₂, in a volume of 61. Thermocycling was performed using a 9700 cycler (Perkin-Elmer) as follows: 5 minutes at 96° C.; 55 cycles of 96° C. for 2 seconds and 53° C. for 2 minutes per cycle, then 15 minutes at 50° C. Excess unincorporated nucleotides were dephosphorylated using Shrimp Alkaline Phosphatase (SAP), and purified using a 3K 96-well filter plate (Pall Scientific) fitted onto a vacuum manifold with a pressure of >25 cm Hg. 16 μg of each purified pooled PCR product was labeled with 40 nmol each of biotin-16-ddUTP and biotin-16-dUTP (Perkin Elmer) using 1400 units of recombinant TdT (Roche). 7.4 μl of 10 mg/ml herring sperm DNA was added to each DNA sample and the samples denatured at 99° C. for 20 minutes.

[0264] Array Hybridization

[0265] The labeled PCR products were hybridized to the high-density oligonucleotide arrays at 50° C. overnight in the following conditions: 70 ng/μl DNA, 3M TMACl, 10 mM Tris pH 8.0, 0.01% Triton X-100, 0.05 nM control oligo, and 0.42 mg/ml herring sperm DNA. After a brief wash in 1×MES buffer, the arrays were then incubated with 5 μg/ml streptavidin (Sigma Aldrich) for 15 minutes at 25° C., followed by 1.25 μg/ml biotinylated anti-streptavidin antibody (Vector Laboratories) for 10 minutes at 25° C., and then 1 μg/ml streptavidin-Cy-chrome conjugate (Molecular Probes) for 15 minutes at 25° C. After a final wash in 0.2×SSPE for 30 minutes at 37° C. the arrays were scanned with a custom built confocal laser scanner to measure the Cy-chrome fluorescence of the hybridized labeled sample. The intensities of the perfect-match and mismatch alleles features were used to determine the genotypes of the SNPs.

[0266] Data Filtering

[0267] After quality filters were applied to the stage one data, there were and 221,658 and 190,220 SNPs with a call rate of at least 90% that were polymorphic in the European and Indian Asian scans, respectively. Tests for association were performed for a smaller set of 216774 SNPs in the European scan and 180,410 SNPs in the Indian Asian scan, with Hardy-Weinberg equilibrium P>0.001. These sets had average call rates of 98.9% and 98.6%, respectively. The arrays used in the European scan performed better because these SNPs were chosen from a set that had already performed well on similarly designed arrays, and were specifically chosen for optimal coverage in a panel of European ancestry.

[0268] For stage two, 922 SNPs were genotyped for triglycerides, and 900 for HDL cholesterol. Of these, 689 and 656 respectively were polymorphic and passed QC (call rate >90% and Hardy-Weinberg P>10-9). For each phenotype, we tested just the subset of SNPs that had been selected for genotyping based on prior data for that phenotype in the whole genome stages of the project. In stage three, the average call rate for the 32 SNPs was 98.2%.

[0269] Statistical Analysis

[0270] Genotypes were coded as allele counts (0, 1, 2) in linear regression models. This corresponds to fitting an additive model where each allele copy makes the same incremental contribution to the phenotype. Models included adjustment for age, alcohol (stages one and two), gender (stages two and three) and CHD status (stage one). Triglycerides and HDL cholesterol were transformed prior to analysis using either −1/sqrt of log transformation to remove skew. The primary test for association consisted of a comparison of the variance explained by the full model, versus variance explained by a model without the genotype term.

[0271] In the stage one scans, we did not see strong evidence for population stratification in the test results. Using Genomic Control (Bacanu et al., Am. J. Hum. Genet., 66, 1933-1944 (2000)) variance inflation factors determined for the various phenotypes were ≦1.07, so we did not make corrections for population structure.

[0272] In stage two, we used principal components analysis (PCA) to characterize population structure (Price, 2006, supra). The first two principal components effectively capture the reported ancestry of the samples (FIG. 5I). The third component identified a subset of SNPs whose genotypes were unusually sensitive to experimental variability in the genotyping process. The existence of this type of artifact and the ability of PCA to detect it has been previously noted (Price, 2006, supra, Clayton et al., Nat. Genet. 37, 1243-1246 (2005)). This component was correlated with variability in overall brightness of a microarray, which is sensitive to experimental variation in the fragmentation, hybridization, and staining processes. While the genotype calling algorithm attempts to correct for systematic scan-level variation, the correction is less successful for some SNPs. Additional components generally seemed to be associated with individual elements of local linkage disequilibrium structure, rather than correlations across unlinked markers. Hence we included just the top three components as covariates in the regression models.

[0273] To improve the accuracy of P values and false discovery rate estimates in stage two, we also employed genomic control to measure and eliminate limited amounts of residual variance inflation in the test statistics. For each phenotypic analysis, we computed variance inflation factors using the complementary set of SNPs genotypes in stage two that had not been selected specifically for association testing on that phenotype. We first transformed P values to χ2 statistics, and then computed the inflation factor as the median test statistic divided by 0.455. This yielded an inflation factor of 1.05 for triglycerides and 1.10 for HDL cholesterol. Residual variance inflation may be due to population structure not accounted for by the top principal components, or violations of assumptions of the parametric models (i.e. homoscedasticity, normality of residuals).

[0274] Stage three involved analysis of 32 SNPs in a cohort of men and women of European ancestry. Results of linear regression analyses in stage three were combined with results of stage two, using Fisher's method (Fisher R. A., Statistical methods for research workers 13^{th} ed., Oliver & Lloyd, London (1925)). This approach was used instead of a joint analysis, because we did not genotype a sufficient number of SNPs in stage 3 to model population structure in that set of samples. We did not include stage one data in the combined analysis as SNPs tested in stage two and three were not consistently present in the stage one scans.

[0275] For many of our reported associations, we identified multiple SNPs in the same genomic interval. To determine the extent to which these associations were independent, as opposed to indirect associations due to linkage disequilibrium, we performed analyses of two-SNP models in the stage two and stage three data. Given a pair of SNPs from Table 15 in the same genomic interval, we determined whether one SNP still accounted for a significant amount of variance, after conditioning on the other SNP. This analysis cannot prove independence, since two assayed markers may be in low LD with one another, but both be in LD with a hidden causal variant. But it can identify sets of markers consistent with just one causal variant. Since we did not attempt to obtain comprehensive coverage of common variants in these intervals, we think this pairwise analysis is more appropriate than a haplotype based approach.

[0276] In the triglyceride analysis, three regions were identified with multiple significant associations: the MLXIPL region with four SNPs, the LPL region with five SNPs, and the APO cluster region with four SNPs. For the MLXIPL region, conditioning on rs3812316 accounted for association at rs12056034, rs17145732, and rs799160 (stage two: P=0.83, P=0.27, P=0.35; stage three: P=0.13, P=0.14, P=0.03). For the LPL region, conditioning on rs328 accounted for association at rs325, rs17410914, and rs4406409 (P=0.57, P=0.07, P=0.15). There was weak evidence for residual association at rs326 (P=0.004) but rs328 still accounted for most of the variance attributable to rs326. For the APO region, conditioning on rs1558861 accounted for associations at rs2075292, rs7124741, and rs17120139 (stage two: P=0.10, P=0.17, P=0.15; stage three: P=0.17, P=0.10, P=00.08).

[0277] We examined the association of rs3812316 with other metabolic phenotypes. Although rs3812316 was associated in stage two with HDL (P=0.0002), hypertension (P=0.02) and metabolic syndrome (P=0.01), these relationships were confounded by the correlations of these phenotypes with triglycerides. After adjustment for triglycerides, the associations were no longer significant. In stage three, the association of rs3812316 with these phenotypes did not replicate.

[0278] The relationship of rs3812316 with triglycerides was not influenced by BMI or gender.

[0279] In the HDL analysis, two regions were identified with multiple significant associations: the LPL region with three SNPs, and the CETP region with six SNPs. For the LPL region, in stage two, tests for conditional association indicated that the three SNPs were not independent, but no SNP stood out as most informative (for all two-SNP models, P>0.05 for a second SNP effect). In stage three, rs326 was most informative, and conditioning on this SNP abolished associations at rs325 and rs328 (P=0.85, P=0.93). For the CETP region, in stage two, conditioning on rs7205804 accounted for associations at rs2217332, rs711752, and rs5882 (P=0.27, P=0.05, P=0.10). The signal at rs5880 was partially independent of rs7205804 (P=3.2×10−7), and rs1800777 was accounted for by rs5880 (P=0.89). In stage three, we saw a similar pattern, though in this case, rs711752 was best at accounting for rs2217332, rs7205804, and rs5882 (P=0.09, P=0.87, P=0.22).

[0280] Again, the signal at rs5880 was partially independent of rs711752 (P=3.7×10−8) and accounted for rs1800777 (P=0.19). Lipid lowering with statins may have influenced the genotype-phenotype relationships. Although we did not adjust for statin use in stages 1 and 2 (where usage averaged 37% and 10% respectively), measurements for stage 3 were taken after a “wash-out” period with no statin usage, and therefore are unaffected by treatment confounding.

[0281] To address the question of SNP interactions, for triglyceride and HDL analyses, we examined all two-SNP models for the SNPs identified in Table 1, in the stage two data. We included additive main effects for both SNPs plus a multiplicative interaction term. We assessed significance of the interaction term by analysis of variance after accounting for main effects. For both phenotypes, we found no interactions that were significant after Bonferroni correction. We repeated the analyses with genotypes coded as factors rather than allele counts, with the same result.

### Phase I

[0282] In the first phase, genome-wide association scans were performed on DNA from the male Indian Asian cases and controls for a total of 248,537 single nucleotide polymorphisms (SNPs) evenly spaced through out the human genome. Similarly, the male Caucasian case and control samples were genotyped on a total of 266,722 SNPs chosen to represent the maximum coverage based on linkage disequilibrium (LD) previously established in the European Caucasian population [David A. Hinds et al. (2005) Whole genome patterns of common DNA variation in three human populations. Science, Vol 307, p 1072-1079]. Rigorous quality control filters [David A. Flinds et al. (2004) Application of pooled genotyping to scan candidate regions for association with cholesterol levels. Human Genomics, Vol 1. No. 6, p 421-434] were applied to exclude allele frequency estimates that were determined to be unreliable. In the European and Indian Asian scans, 216,774 and 180,410 SNPs were successfully genotyped, respectively.

[0283] All of the samples used in Phase I were of male gender. The cases were selected based on the criteria described above and the controls were selected by random digit dialing recruitment matching the geographical location near London, U.K. Some of these subjects were on anti-diabetic or anti-hypertensive medications when samples were collected.

[0284] Primary analysis tested for association of SNPs with case/control status, based on the ATPIII definition. Secondary analyses were performed to identify the potential SNP markers that were associated with the individual components of the metabolic syndrome listed above. The two populations were analyzed separately and the results were used to pick SNPs for replication in additional populations.

[0285] Three SNPs showed genome-wide significance after Bonferroni correction. Two SNPs, rs1558861 and rs17120139, both flanking the APOA1-ApoC3-APOA4-APOA5 gene cluster on chromosome 11q23, were associated with triglycerides in the Indian Asian scan (P=3.8×10⁻⁵ and P=0.011, respectively, after correction for 180,410 tests). One SNP, es711752 in the CETP gene, was associated with HDL cholesterol in the European scan (P=7.2×10⁻⁵ after correction for 216,774 tests).

### Phase II

[0286] There were four distinct populations used for Phase II of the study: 1181 female Indian Asians, consisting of 407 cases and 774 controls; 859 female Caucasians, consisting of 153 cases and 707 controls; 1560 female Mexicans, consisting of 774 cases and 785 controls; and 969 male Mexicans, consisting of 402 cases and 567 controls.

[0287] The female Indian Asian and Caucasian samples were characterized in the same way as the male Indian Asian and Caucasian samples used in Phase I, although these female samples were collected predominantly by random digit dialing with some of them being based on cardiovascular disease status.

[0288] The Mexican samples were collected by the Instituto Nacional de Ciencias Medicas y Nutricion in Mexico City, Mexico. Control samples in this cohort consist of healthy individuals aged 40 or over without any chronic disorder with normal HDL cholesterol and normal blood pressure. Patients with hypothyroidism, irritable bowel syndrome, or osteoarthrosis can be included. The control samples were identified from patients of the thyroid clinic or those with irritable bowel disease or osteoarthritis. In addition, workers (aged 40 or older) in some factories were offered free medical consultation and the opportunity to participate in the study offered. Exclusions for controls included the use during the previous two months of beta blockers, diuretics, glucocorticoids, estrogen, progestins, androgens, and statins; a body mass index above 30 kg/m²; type 2 diabetes; CHD; and gestational diabetes.

[0289] The primary goal of the Phase II statistical analysis was to validate the SNPs selected for each outcome of interest. For each outcome, all four groups were fit using a single statistical model with population being treated as a factor with four levels (Mexican males, Mexican females, UK Caucasian females, UK Indian females). This model included a categorical variable indicating the source population (along with appropriate interactions with other covariates).

[0290] In this second (“replication”) phase, multiple strategies were used to identify SNPs for replication. To enhance power, in Phase II SNPs that showed equivocal significance in the genome-wide scans were selected for further testing in larger cohorts. Approximately one third of the SNPs were chosen based on those that were significantly associated with the most critical phenotypes (Metabolic syndrome, HOMA, HDL, BMI, coronary heart disease, and hypertension) with p<0.0001 in either scan or with p<0.001 and the direction of change the same between the Phase I scans as well as SNPs in druggable or extracellular genes with p<0.01 in any phenotype. Another one third was picked using multivariate analysis with the three major components of disease (lipids, glucose/insulin, and hypertension/blood pressure). The remaining one third of SNPs was chosen by the relevant therapeutic areas using a variety of criteria. There was overlap of SNPs among these categories. Additional SNPs were selected (from dbSNP) to enhance coverage in the vicinity of the identified associations. In this fashion, 922 SNPs were identified for further testing against triglyceride levels and 900 SNPs for further testing against HDL cholesterol in 4,568 individuals from four additional cohorts (859 European women, 1,181 Indian Asian women, 1,560 Mexican women and 968 Mexican men).

[0291] Genotyping was performed as described above, using a custom array, and was successful for 689 triglyceride and 656 HDL cholesterol SNPs, consistent with previous experience (Patil, L. et al. Science 294, 1719-1723 (2001). Data were analyzed as described above, under an additive model, using linear regression combined with principal components analysis to model population structure in the combined dataset (Price, A. L. et al., Nat. Genet. 38, 904-909 (2006)), assuming a common genotype effect across populations (see also FIG. 1). Genomic control was used to adjust the distributions of test statistics for residual variance inflation (Bacanu et al., 2000, supra).

### Phase III

[0292] In Phase III, the findings of Phase II were replicated, by genotyping all SNPs with false discovery rate <0.40. This comprised 22 SNPs for triglycerides and 15 for HDL cholesterol, which we tested using Taqman assays in 4,836 men and 1,132 women of European ancestry from the Treating to New Targets (TNT) study (LaRosa et al., N. Engl. J. Med. 352, 1425-1435 (2005)). Fisher's method was used to provide a combined analysis of the results from Phases II and III (Fisher, R. A., Statistical Methods for Research Workers, supra).

### Results

[0293] Replication genotyping results were generated for 4,982 SNPs that were polymorphic and had call rates of at least 80%, out of 5,716 SNPs attempted. When calculating false discovery rates, results for 369 SNPs that were substantially out of Hardy Weinberg equilibrium in both the UK Indian and Caucasian female samples (P<10⁻¹⁰), or that showed evidence of inconsistent genotyping across experiment dates (P<10⁻¹⁰) were excluded. For each phenotype, the regression analysis was done such that the p value was calculated against the complete subset of SNPs used in the replication genotyping. The p value cut-off of 0.05 was adopted for the replication test significance. False discovery rates (FDRs) across the complete subset of SNPs were also computed.

[0294] In summary, 2,348 single nucleotide polymorphisms (SNPs) tested positive for replication of significant (p≦0.05) associations with metabolic syndrome, or one of the related phenotype outcomes. The SNPs meeting the significance level and thereby identified as associated with one or more metabolic syndrome phenotypes are listed in Tables 1-14.

[0295] Tables 1-14 are individual worksheets for metabolic syndrome status or one of the components: metabolic syndrome case control status (Table 1); diabetic case control status (Table 2); myocardial infarction case control status (Table 3); hypertension case control status (Table 4); body mass index (BMI) (Table 5); waist circumference (Table 6); diastolic blood pressure (Table 7); systolic blood pressure (Table 8); HDL cholesterol (Table 9); triglycerides (Table 10); insulin: Depending on the availability of insulin measurement values, the analysis was subdivided into non-diabetic and non-Mexican analyses (Tables 11 and 12, respectively); and HOMA: Similarly as for insulin, the analysis of homeostasis analysis was subdivided into non-diabetic and non-Mexican analyses (Tables 13 and 14, respectively). The following is a description of the column headings for Tables 1-14.

TABLE 16
COLUMN IDENTIFIERS FOR TABLES 1-14

| Column | |
|---|---|
| Name | Description |
| snp_id | SNP identifier. Perlegen SNP identifiers may be used for |
| | accessing additional information about the SNP using the |
| | Genotype Browser on the Perlegen Sciences, Inc. website |
| | (genome(dot)perlegen(dot)com/browser/index.html). |
| refsnp_id | NCBI dbSNP identifier. |
| chrom | Chromosome ID (1-22, X or Y). |
| Accession | NCBI GenBank sequence accession and version number. |
| Position | SNP position in NCBI build 34 sequence. |
| Alleles | The allelic sequences for the SNP. |
| Flank | The two 25-mer sequences flanking the SNP. |
| genes_near | A text representation of genes surrounding the SNP. |
| m_freq | Frequency of the reference allele in the Mexican samples. |
| i_freq | Frequency of the reference allele in the UK Asian Indian |
| | samples. |
| c_freq | Frequency of the reference allele in the UK Caucasian |
| | samples. |
| p_freq | P value for significance of the genotype term(s). |
| q_freq | Estimated false discovery rate (FDR) for the P value |

[0296] Attached Table 18, also using some of the above identifiers, summarizes the results for SNPs that were subject to validation in the metabolic syndrome study described in the present example.

[0297] Further identifiers used in the columns of Table 18 are explained in Table 19. In Table 18 the “genes_near” column lists all transcripts within 50 kb, and at least one transcript upstream and downstream regardless of distance. A spacer like “- -” indicates an interval or more than 50 kb, and longer spacers indicate longer intervals. Transcripts that contain the SNP are enclosed in brackets.

[0298] For HDL and triglycerides, the measurements were log transformed, so the effect sizes from the linear regression are in log units. For hypertension and metabolic syndrome case/control status, logistic regression was used, and the effect sizes are in log odds units.

[0299] Cells in the stage 1a, 1b, and 3 results are colored to indicate consistency of those results with the stage 2 results. Results are colored green if they are consistent with the direction of effect in stage 2, or red if they are inconsistent. It is emphasized, however, that “poor correlation” in this data set should not be viewed as an indication that such correlation does not exist. The intensity is scaled based on the corresponding P value. The designation of positions and gene links in Table 18 has been updated in accordance with NCBI Build 36. For instance, the gene originally designated WBSCR14 is now referred to as MLXIPL.

[0300] Table 18 includes associations with HDL, triglycerides, hypertension status, and metabolic syndrome case/control status. As described above, stages 1a and 1b of this study were genome scans in Indian Asian and Caucasian men; stage 2 was replication in Mexican men and women, and Indian and Caucasian women; and stage 3 was replication in Caucasian men and women from the TNT study. SNPs were selected for validation based on a false discovery rate <0.4 in stage 2 of the study. Alleles are provided as reference over alternate sequence. It is noted that some SNPs listed in Table 18 have shown associations on multiple phenotypes:

[0301] HDL and triglycerides: rs17145732, rs325, rs326, rs328, rs4824743.

[0302] HDL and case/control status: rs7205804.

[0303] For triglycerides, 13 SNPs were found with combined P values significant at P<7×10⁻⁵ (equivalent to P<0.05 after Bonferroni correction for 689 successfully genotyped SNPs (Table 18). Four SNPs in the MLXIPL region were associated with raised triglyceride levels. These SNPs fall within an interval of high linkage disequilibrium spanning more than 200 kb (FIG. 2). The most significant association was a nonsynonymous (ns) SNP (rs3812316, Gln241His) in MLXIPL, with a combined uncorrected P value across Phases II and III of 0.4×10⁻¹⁰ (corresponding to P=9.9×10⁻⁸ after Bonferroni correction). SNP rs3812316 conferred an odds ratio of 1.29 per copy of the major C allele for triglyceride levels >1.7 mmol/l. Median triglyceride levels were 2.07, 1.996 and 1.75 mmol/l with rs3812316 CC, GC and GG genotypes, respectively, among subjects in Phase III, of which 80% were homozygous for the high-risk wild-type allele (Table 18). There was a similar gradation in triglyceride levels in the Phase II populations. There were no significant associations between rs3812316 and other tested phenotypes after adjusting for triglyceride levels and accounting for multiple testing, as described above. Regression analyses indicated that these results were consistent with a single casual variant within the MLXIPL region.

[0304] Of the remaining nine markers associated with triglycerides, four were in the vicinity (within 70 kb) of the APOA1-APOC3-APOA4-APOA5 cluster, and five were in or around the LPL gene. SNP rs3812316 in MLXIPL accounted for a similar proportion of population variation in triglyceride levels, compared to SNPs in LPL and the APO cluster. For HDL cholesterol, 9 SNPs were found with combined P<8×10⁻⁵ (equivalent to P<0.05 after Bonferroni correction for 656 successfully genotyped SNPs, Table 18). Six of these were in or around the CETP gene, one was in the LPL gene, one was in the LIPC gene and one was a nsSNP in ABCA1 (rs9282541, Arg230Cys) that was frequent only in the Mexican cohorts. All of these are well-recognized associations (Ordovas, J. M. Cardiovasc. Drugs. Ther. 16, 273-281 (2002), Romeo et al., Nat. Genet. 39, 513-516 (2007), Saxena et al., Science 316, 1331-1336 (2007)).

[0305] Although deep resequencing of the locus and functional studies will be needed to identify the casual variant, the finding of an association between nsSNP rs3812316 in MLXIPL and triglyceride levels in man is new and biologically compelling. MLXIPL is a transcription factor with a pivotal role in glucose utilization and energy storage (Uyeda & Repa, J. Cell. Metabolism 4, 107-110 (2006), Ma et al., J. Biol. Chem. 281, 28721-28730 (2006)). SNP rs3812316 is in an evolutionarily conserved region of the gene encoding a domain involved in glucose-dependent activation of MLXIPL (Li et al., Diabetes 55, 1179-1189 (2006)). Glucose flux into hepatocytes results in elevated xylulose 5-phosphate, which promotes the action of protein phosphatase 2A and results in nuclear translocation of MLXIPL. Nuclear MLXIPL dimerizes with MLX and binds carbohydrate response elements to increase transcription of genes involved in glycolysis, lipogenesis, triglyceride synthesis and very-low-density lipoprotein secretion. Conversely, starvation or high-fat as compared to high-carbohydrate feeding increases the activities of cAMP- and AMP-dependent kinases, respectively, and phosphorylate MLXIPL to reduce DNA binding and promote nuclear exclusion of MLXIPL>.

[0306] The low triglyceride levels associated with the Gln241His polymorphism suggest reduced MLXIPL function and are consistent with the low triglyceride levels in MLXIPL-null mice (Uyeda & Repa, J. Cell Metabolism 4, 107-110 (2006)). The major, wild-type Gln241 allele of MLXIPL is associated with increased triglyceride synthesis. Wild-type MLXIPL may thus permit more efficient food utilization, fat deposition and rapid weight gain at times of food abundance, making individuals better able to survive subsequent times of famine. In modern times, with continuous and reliable food supply, these genes may become disadvantageous, leading to excess energy storage in preparation for a famine that never comes. MLXIPL is therefore a plausible candidate for a “thrifty gene,”—the classic concept proposed by Neel in 1962 (Diamond, J., Nature 423, 599-602 (2003)).

### Example 11

### Background

[0307] Indian Asians (IA) are at increased risk of Type 2 Diabetes (T2D) compared to other populations. In the UK, T2D prevalence is 4 times higher among IA compared with Northern Europeans (NE). Recent studies in Caucasian populations have suggested an association of allelic variation in the TCF7L2 gene with T2D (Grant, et al. (2006) Nature Genetics 38(3):320-323). The purpose of this study was to i) replicate previous finding in NE and ii) investigate whether TCF7L2 is associated with T2D in IA, and accounts for their increased risk of T2D.

[0308] Methods

[0309] We investigated 1006 IA (271 T2D+, 735 T2D−), and 1005 NE (177 T2D+, 828 T2D−) men aged 35-65 yrs. Based on the LD structure of SNPs in the TCF7L2 interval in HapMap CEU samples, two SNP markers (rs4506565 and rs6585200) for which we had previously developed assays, and which showed moderate to strong pairwise r² with the reported SNP markers in TCF7L2 were identified. All participants were genotyped for rs4506565 and rs6585200.

[0310] Results

[0311] The allele frequencies in T2D cases and controls, and odds ratios for the association between genotype and T2D status are shown (Table 17). SNP rs4506565 was associated with T2D in both IA and NE, with both effects in the expected direction. There was no evidence of association between rs6585200 and T2D, however the LD data suggested a smaller effect at this site. There was no increase in the prevalence of either rs4506565 or rs6585200 amongst IA compared to NE.

### CONCLUSIONS

[0312] This study is the first to demonstrate that TCF7L2 is associated with T2D in IA, and further validates the association with T2D in Caucasian populations TCF7L2. As such, SNPs within or in linkage disequilibrium with TCF7L2 (in particular, SNP rs4506565) are useful for diagnosing or prognosticating type 2 diabetes, or determining the risk of developing type 2 diabetes, in individuals from Indian Asian and Caucasian populations.

TABLE 17

| | | | | |
|---|---|---|---|---|
| A/a | freq₁ | freq₀ | Odds Ratio [95% CI] | P value |

INDIAN ASIANS

| | | | | | |
|---|---|---|---|---|---|
| rs4506565 | T/_{A} | 0.359 | 0.294 | 1.34 [1.08, 1.66] | 0.0088 |
| rs6585200 | G/_{A} | 0.456 | 0.427 | 1.14 [0.93, 1.39] | 0.2132 |

Northern Europeans

| | | | | | |
|---|---|---|---|---|---|
| rs4506565 | T/_{A} | 0.370 | 0.302 | 1.29 [1.01, 1.64] | 0.0422 |
| rs6585200 | G/_{A} | 0.477 | 0.447 | 1.08 [0.85, 1.37] | 0.5181 |

[0313] Although the above discussion has presented the present invention according to specific methods, systems and apparatus, the present invention has a broader range of applicability. Further, while the foregoing invention has been described in some detail for purposes of clarity and understanding, it will be clear to one skilled in the art from a reading of this disclosure that various changes in form and detail can be made without departing from the true scope of the invention. For example, all the methods, techniques, systems, devices, kits, apparatus described above can be used in various combinations. All publications, patents, patent applications, and/or other documents cited in this application are incorporated by reference in their entirety for all purposes to the same extent as if each individual publication, patent, patent application, and/or other document were individually indicated to be incorporated by reference for all purposes.

Lengthy table referenced here
US20090186347A1-20090723-T00001
Please refer to the end of the specification for access instructions.

LENGTHY TABLES
The patent application contains a lengthy table section. A copy of the table is available in electronic form from the USPTO web site (http://seqdata.uspto.gov/?pageRequest=docDetail&DocID=US20090186347A1). An electronic copy of the table will also be available from the USPTO upon request and payment of the fee set forth in 37 CFR 1.19(b)(3).

The application's sequence listing, which the Patent Office published only in electronic form, follows.

SEQUENCE LISTING (4248 sequences)

SEQ ID NO: 1 - DNA, 51 bp, Homo sapiens
agaatgagggagaaagctgatgaggrttacatggactaagtaaagtagaag

SEQ ID NO: 2 - DNA, 51 bp, Homo sapiens
gtcttaaatttttatacctggactcytagtgtattaatttttgtttagaaa

SEQ ID NO: 3 - DNA, 51 bp, Homo sapiens
tgggaggggcccagaaagtcaaaagygaatccctattcttggtgatggcaa

SEQ ID NO: 4 - DNA, 51 bp, Homo sapiens
cttgttacggttatataaatgtactsaatagcaacataattgaataaattt

SEQ ID NO: 5 - DNA, 51 bp, Homo sapiens
tttaagcaattaaatagtgatgatcrcagagggtcccaggcccaggtgtgg

SEQ ID NO: 6 - DNA, 51 bp, Homo sapiens
aaactggatgatcaattggtccctawagaaaatggcttcatttggggtcaa

SEQ ID NO: 7 - DNA, 51 bp, Homo sapiens
atacacaaacaggtcagaaagctccmaatgtagcagttaaacagtgtttcc

SEQ ID NO: 8 - DNA, 51 bp, Homo sapiens
ggatgctacataagtaattattggcyattagctccttagaatggccgagtc

SEQ ID NO: 9 - DNA, 51 bp, Homo sapiens
gcttcgttcccctcttacttttcacsttactacttgcaattctctagctca

SEQ ID NO: 10 - DNA, 51 bp, Homo sapiens
gaggctagattctgaaatgttcccargtccagccatgaggccaagggaatc

SEQ ID NO: 11 - DNA, 51 bp, Homo sapiens
ctgtcttgcttatggtagttattctrctaggtcttacactatggattttta

SEQ ID NO: 12 - DNA, 51 bp, Homo sapiens
ccccagagaactcaccaaaccgccakgcacaggaagcgcaggagggcgaaa

SEQ ID NO: 13 - DNA, 51 bp, Homo sapiens
aacatttcctggagtggttctgggcycctgcctttgctttcctcccgtaac

SEQ ID NO: 14 - DNA, 51 bp, Homo sapiens
tctgggatacacattctttggcttgytccaaggactgaaacctaaaatctg

SEQ ID NO: 15 - DNA, 51 bp, Homo sapiens
gcatgctgcactcacttggtcggagsaggcactgtgaatcacaggctgatt

SEQ ID NO: 16 - DNA, 51 bp, Homo sapiens
cagtcaggagtgtgtgtaccctgtgstcagcctgcttccagactcggctgc

SEQ ID NO: 17 - DNA, 51 bp, Homo sapiens
cagctttattgattatcatccattgyagtttgtagagaagtctgtttacaa

SEQ ID NO: 18 - DNA, 51 bp, Homo sapiens
taaccaaaaagcaacaagtatagtcytaaaaataaaggctaagacatgagt

SEQ ID NO: 19 - DNA, 51 bp, Homo sapiens
atacaaattattataggagagaaatrttttgcatgttgttctggggcctgt

SEQ ID NO: 20 - DNA, 51 bp, Homo sapiens
ttatagctacctagtccattattacrtattctcagcatggcgtttttcact

SEQ ID NO: 21 - DNA, 51 bp, Homo sapiens
ttgaccctggaggcccatccaccaayggaagagaaagacggagaagacagg

SEQ ID NO: 22 - DNA, 51 bp, Homo sapiens
aatcttactgttctacttaattatargaggcacagaactagctcttttcaa

SEQ ID NO: 23 - DNA, 51 bp, Homo sapiens
ggtcatggaaggctgttgggggcacraatcaccataaccatgctcaagcaa

SEQ ID NO: 24 - DNA, 51 bp, Homo sapiens
gatgacaagggaagagatactctggyggagtgcaacctcttcttgaacatc

SEQ ID NO: 25 - DNA, 51 bp, Homo sapiens
atttactatcaaatctcagttgttaygggcatttatagctattaatacttc

SEQ ID NO: 26 - DNA, 51 bp, Homo sapiens
aaccaccaagaccatgaaatagatcygaagcccacttctcatatgtctgtc

SEQ ID NO: 27 - DNA, 51 bp, Homo sapiens
cttacctctataatgtatgtttattstagctggttcatctcttccttatat

SEQ ID NO: 28 - DNA, 51 bp, Homo sapiens
gcttaactaaactcatattttccatytgagggccaggttcacagcatttta

SEQ ID NO: 29 - DNA, 51 bp, Homo sapiens
gaacggtgcctggtacacactaggcrctccatggatgcacaggactggtca

SEQ ID NO: 30 - DNA, 51 bp, Homo sapiens
tttgtgttgcaaatgagttatagagktgaatccatgtggggccagaaagta

SEQ ID NO: 31 - DNA, 51 bp, Homo sapiens
gacacacatagatattgataattatkgctgtacctgagatcttgttgggaa

SEQ ID NO: 32 - DNA, 51 bp, Homo sapiens
tagtccccagtgtttactcttcccayctctatgtccatatgtacttactgt

SEQ ID NO: 33 - DNA, 51 bp, Homo sapiens
tcctggaagagcaggaacaaatttgyaggtaaagatagatagctacagagt

SEQ ID NO: 34 - DNA, 51 bp, Homo sapiens
gaaatgtgaatttagtatttgtcaaytaatgctgttaagttagagacctgt

SEQ ID NO: 35 - DNA, 51 bp, Homo sapiens
tttcgcacattgacatctgcctgctrttcctttagccaggatgcctgaatg

SEQ ID NO: 36 - DNA, 51 bp, Homo sapiens
ccaaggcttcatgtgtgcttcatgayagtcctgccagaaggcattattata

SEQ ID NO: 37 - DNA, 51 bp, Homo sapiens
ttggctgaactcgcatgaggccatgycatgatgatcacagggacttctgtg

SEQ ID NO: 38 - DNA, 51 bp, Homo sapiens
cattgatctccacccgcacaatgatsacctcataataccactcccgccgga

SEQ ID NO: 39 - DNA, 51 bp, Homo sapiens
aaacacaatttgcatatgatcttccstccaaccctaagaaatattaaacca

SEQ ID NO: 40 - DNA, 51 bp, Homo sapiens
gttataaatgcaaataattatccctstcagcactcactgaaactctccttt

SEQ ID NO: 41 - DNA, 51 bp, Homo sapiens
ctactatttgtaccatgaggttgatktgaagaatttgaaccttctgacata

SEQ ID NO: 42 - DNA, 51 bp, Homo sapiens
aggtcacagatctgggatcctttccygccaccttcaagaagggaataaagc

SEQ ID NO: 43 - DNA, 51 bp, Homo sapiens
ggtagggagcaacctcccgctgctcyggaggacttgaaccctcaggcattt

SEQ ID NO: 44 - DNA, 51 bp, Homo sapiens
agttgttgtgtgcccagcacagtgaygattggggtaaaagagtgcttgtga

SEQ ID NO: 45 - DNA, 51 bp, Homo sapiens
tgcccgcctaatatttaatctgcaawgtagtctgctccaggagcagtgttc

SEQ ID NO: 46 - DNA, 51 bp, Homo sapiens
agagcctcacgcctgaattctattcrcagcttatttgcctcattccataac

SEQ ID NO: 47 - DNA, 51 bp, Homo sapiens
tgattgaaagactagtttgtttctcycatatctgaaaatggaatgcattcc

SEQ ID NO: 48 - DNA, 51 bp, Homo sapiens
gtgatataaaaatccaaataggcaawcctgggttaatataatggctttatg

SEQ ID NO: 49 - DNA, 51 bp, Homo sapiens
ctccacctgctaagagtctaaatttkcacactagttttattgtaattttca

SEQ ID NO: 50 - DNA, 51 bp, Homo sapiens
gcccacgggctgctcatcgtgagccrggtcagtgaccaacagtgctcagac

SEQ ID NO: 51 - DNA, 51 bp, Homo sapiens
agaaatatcttgtgcttacagtaagyggtggcatgaatctctcgctcttct

SEQ ID NO: 52 - DNA, 51 bp, Homo sapiens
ggtttattaagcctctcaaagaaacraccacttctgtgcgctatcatcaaa

SEQ ID NO: 53 - DNA, 51 bp, Homo sapiens
acacagactctagttttgaaactctyatttgaaacagaaagttatatatga

SEQ ID NO: 54 - DNA, 51 bp, Homo sapiens
agcaaagagttaatctgacagcaggstagttcctctgactaaatacaaata

SEQ ID NO: 55 - DNA, 51 bp, Homo sapiens
ggtattctggaagatacgaaaacccrtctggcccttcagaagccccttctt

SEQ ID NO: 56 - DNA, 51 bp, Homo sapiens
tccaattggagagtaagtagtgtccrtggactcggtccccctgttcccttt

SEQ ID NO: 57 - DNA, 51 bp, Homo sapiens
acagcacattcacagtgagacaaacmcaggtcataatgagagcagaagacc

SEQ ID NO: 58 - DNA, 51 bp, Homo sapiens
taagtgaacagtaacactaaatatcrcagtgccagccgaccattttatata

SEQ ID NO: 59 - DNA, 51 bp, Homo sapiens
atcttttaggctatcggagacctgascatatttgtaggcaaacagcaagaa

SEQ ID NO: 60 - DNA, 51 bp, Homo sapiens
ttaaaacatgaacttgttgtgcgtgkcttggatagcaaaaaaaatccctct

SEQ ID NO: 61 - DNA, 51 bp, Homo sapiens
tgcacgcctgtgtgcaacagccctgrccctagtttctctgtatcctgttgc

SEQ ID NO: 62 - DNA, 51 bp, Homo sapiens
tttagttcctgctctcaattctggcrttctgaagcttaacgaccagcaaac

SEQ ID NO: 63 - DNA, 51 bp, Homo sapiens
ccaggatatcgtgactaccgtccagscctcctattctaagaaaaagctctt

SEQ ID NO: 64 - DNA, 51 bp, Homo sapiens
ttcaactctaagcaaatactgtgacragctgctatagcctggaaaatagtt

SEQ ID NO: 65 - DNA, 51 bp, Homo sapiens
tacctgacggagttccacaaggaacrctgttaatgacaatatgtgaaggca

SEQ ID NO: 66 - DNA, 51 bp, Homo sapiens
acacatcaggtgaggggaatatcacragcgagtgaagagagtcaagtgtgt

SEQ ID NO: 67 - DNA, 51 bp, Homo sapiens
aaatgatgcctatctcagaattcttktaaggatttcttagtacaagtgctg

SEQ ID NO: 68 - DNA, 51 bp, Homo sapiens
gagtgcttcctgtatacacatttgtrggcaggcatcatctgctgtgttggg

SEQ ID NO: 69 - DNA, 51 bp, Homo sapiens
tcctgcctttctttactgaccgtccygacgctttcagtgaagtgtctcaaa

SEQ ID NO: 70 - DNA, 51 bp, Homo sapiens
tcataaagatcatagagcatagtgaytcagaagtggcttgcttttatatta

SEQ ID NO: 71 - DNA, 51 bp, Homo sapiens
tgatccattagattcaaatgtagcamatcagaagccctttgagagtggaag

SEQ ID NO: 72 - DNA, 51 bp, Homo sapiens
ctactccagcatgtcagcatgtcagstaccatttgtgcacaaggaaatgag

SEQ ID NO: 73 - DNA, 51 bp, Homo sapiens
acacacgcacatacacaccgcttcayaggaccctaataataaaccaaggac

SEQ ID NO: 74 - DNA, 51 bp, Homo sapiens
atgcctccatggaaactgcgtatcaygtggttaccagtttttcctttggtc

SEQ ID NO: 75 - DNA, 51 bp, Homo sapiens
cttgccatcccagtctgctgtcaggractagggtatatgctgaagaaaaga

SEQ ID NO: 76 - DNA, 51 bp, Homo sapiens
tcctggcttgtaatcttctacacaaygtgccatcaaatggatcatttgggg

SEQ ID NO: 77 - DNA, 51 bp, Homo sapiens
tcaataggggccctgtaaaatacttygtagtgaatccatacaatgaaatta

SEQ ID NO: 78 - DNA, 51 bp, Homo sapiens
cccccataatagaaaagaatatttaytgactcttctgaacattggaataat

SEQ ID NO: 79 - DNA, 51 bp, Homo sapiens
aatatataggctgagaggttgaacaygatattgagaaaaccctctatggtg

SEQ ID NO: 80 - DNA, 51 bp, Homo sapiens
gaagtattaaatgaaattttggagaygattaatttatatgtgtttttagtg

SEQ ID NO: 81 - DNA, 51 bp, Homo sapiens
cagagtggaccaaggtagcaatatgyaatacactagagtcgggagcgagaa

SEQ ID NO: 82 - DNA, 51 bp, Homo sapiens
gtacctttctttttcctgataggcarttatttgggatatacctgtaagtgt

SEQ ID NO: 83 - DNA, 51 bp, Homo sapiens
tagctggccacttgcatcgctgcctrctcaaaccctgggggctctctttcc

SEQ ID NO: 84 - DNA, 51 bp, Homo sapiens
ggtttcagtgaacatagcagttaatygataaaagtaatgttactgaagaac

SEQ ID NO: 85 - DNA, 51 bp, Homo sapiens
aaatggccccaaagagtagatgaggwctcaatagaaccaaatcaggtagga

SEQ ID NO: 86 - DNA, 51 bp, Homo sapiens
ctgtggttcacaatgggtacagctgkgtcttcaacggttcactactcacgc

SEQ ID NO: 87 - DNA, 51 bp, Homo sapiens
aaagatcattactctccataggaatyctgcccttgtccactactgtgagca

SEQ ID NO: 88 - DNA, 51 bp, Homo sapiens
gaaatcaaggggaagagagagctaaygatttggcagaatctcccaaatgct

SEQ ID NO: 89 - DNA, 51 bp, Homo sapiens
ccaaggggctggacagccaagcatgragaacttgctcccctgctcaaaccc

SEQ ID NO: 90 - DNA, 51 bp, Homo sapiens
caagcggcccaggctgtatactctgsgtctactgggtgcccagtgggaaat

SEQ ID NO: 91 - DNA, 51 bp, Homo sapiens
aaggctggtacttagttaaggttggyactcttcagtagttaactgaaataa

SEQ ID NO: 92 - DNA, 51 bp, Homo sapiens
ctcttttgggatcataattggaaagstcctgatcacaaataatatttgatg

SEQ ID NO: 93 - DNA, 51 bp, Homo sapiens
ggctaccagtgtggacaggtcttccrggcatgctgtgtcaagagccaggag

SEQ ID NO: 94 - DNA, 51 bp, Homo sapiens
tttgtttgtgtgtatttcaaattcamtgtcattaatagtctaattacagaa

SEQ ID NO: 95 - DNA, 51 bp, Homo sapiens
gagtttgaggtatgcagtatatctarttatttggtagaaaagtaacctcca

SEQ ID NO: 96 - DNA, 51 bp, Homo sapiens
gttcaaatccattccagggtctattygaaactatgctggtctacctcagga

SEQ ID NO: 97 - DNA, 51 bp, Homo sapiens
gatcgagaccctctctcaaaaaaatrtatagacaataacaagtgttagaga

SEQ ID NO: 98 - DNA, 51 bp, Homo sapiens
catctcctccttctgaccacccagarttcaaaaggacacttttcctttgct

SEQ ID NO: 99 - DNA, 51 bp, Homo sapiens
tgggaatacagaaagagagggccccygaatatggacttctggaagcttctg

SEQ ID NO: 100 - DNA, 51 bp, Homo sapiens
gttgaataaataaaatgattcaacarttttgcaacttatacaaccttagca

SEQ ID NO: 101 - DNA, 51 bp, Homo sapiens
agcctgtgggtctgcctctgagatamctgaaacctaagtccacaatgaggg

SEQ ID NO: 102 - DNA, 51 bp, Homo sapiens
tgcctcagagggtcccagtgggattsagcaccagttgcccatagtgacagc

SEQ ID NO: 103 - DNA, 51 bp, Homo sapiens
gaccatactagatgtctccctcccartgcaagaaaccaacaggcagaaaac

SEQ ID NO: 104 - DNA, 51 bp, Homo sapiens
tgatgtgaggatttgaaacttaggcrgaatagtaagtaccaggcatgggcc

SEQ ID NO: 105 - DNA, 51 bp, Homo sapiens
aatttataaatgcatatctgtttccrtttgcttgtgtctagtttttttcat

SEQ ID NO: 106 - DNA, 51 bp, Homo sapiens
ctattctgaggagctctattagtgtmtgagttaaaagcagaatgcacaatg

SEQ ID NO: 107 - DNA, 51 bp, Homo sapiens
atgttaacttgcactgactcatctgygggatcttgctaaaatgcaggttct

SEQ ID NO: 108 - DNA, 51 bp, Homo sapiens
ttttgggatctacaactccatatcgmtctccagtcgagaatgatttgagac

SEQ ID NO: 109 - DNA, 51 bp, Homo sapiens
taccatgattgatagtataaggcctrcattgtatgtgtagtgtaatatttt

SEQ ID NO: 110 - DNA, 51 bp, Homo sapiens
gtttcttttaaaggattggtaaactsaactgtcacagtcatgtcagaacca

SEQ ID NO: 111 - DNA, 51 bp, Homo sapiens
agatgcaggtgataagcaaaaacgcyttctgccctttgcctttcctgtggc

SEQ ID NO: 112 - DNA, 51 bp, Homo sapiens
gaaagagaaaagttaagctatttccstaataccaaggcaatgcaggtcagc

SEQ ID NO: 113 - DNA, 51 bp, Homo sapiens
gagctgatcaggaagagggaactacrgcgagagaggtttacacatgaggtg

SEQ ID NO: 114 - DNA, 51 bp, Homo sapiens
gctcatttcatccaattctaacttayggtcctgagcactctaacagtttgg

SEQ ID NO: 115 - DNA, 51 bp, Homo sapiens
tgctgggcaagatcctcagtgacaaygcggccaatcgctacagctttgtct

SEQ ID NO: 116 - DNA, 51 bp, Homo sapiens
aaagtggtttcattattcaaaaaaaygtagtatctacctatacttgtgttc

SEQ ID NO: 117 - DNA, 51 bp, Homo sapiens
gccactcctactcacttcctcatcawtctgtcaattttagaggagcccacg

SEQ ID NO: 118 - DNA, 51 bp, Homo sapiens
tagggccaacatgaatgaattgttaracagtagatatttgaaagtgccaat

SEQ ID NO: 119 - DNA, 51 bp, Homo sapiens
ctgtaagtgagtgtcaggagatactyatctaggagatgactctgtggtaga

SEQ ID NO: 120 - DNA, 51 bp, Homo sapiens
aggcagtgctctcttagtcgaccccrgtttctaatttgttcattacctccc

SEQ ID NO: 121 - DNA, 51 bp, Homo sapiens
acagctctcccaggagcatggtaacyaaccccaggcctgcatcactggcca

SEQ ID NO: 122 - DNA, 51 bp, Homo sapiens
tgcagagccagttgcagtagcacagmcccaagctacccagccgaccacttt

SEQ ID NO: 123 - DNA, 51 bp, Homo sapiens
aggcatgctccactgtgcccgaccaytatgaatgccaatattgacatgatc

SEQ ID NO: 124 - DNA, 51 bp, Homo sapiens
cccaggaccattccagagcttattcsttctaccttgttcttccttgggatg

SEQ ID NO: 125 - DNA, 51 bp, Homo sapiens
acatatttcccatgcatacctaaaayctacatgccaaggtttctctctctc

SEQ ID NO: 126 - DNA, 51 bp, Homo sapiens
ggcgtggatccgctgctctccgtggyctggctgtggccggagggctggtcg

SEQ ID NO: 127 - DNA, 51 bp, Homo sapiens
tatggcctaatctggagggtgttccrtgtacatttgagaagagtgcgcatt

SEQ ID NO: 128 - DNA, 51 bp, Homo sapiens
gtgagtgccaaggccagatgacaacstttccatggaggctttgttctcaaa

SEQ ID NO: 129 - DNA, 51 bp, Homo sapiens
acaaaagaacagccaggatgaaggargatgaagagtaagaagacgaagaga

SEQ ID NO: 130 - DNA, 51 bp, Homo sapiens
ttgttccatgtgaaatgggagcatgkgttgacaaaccgttgattaacttga

SEQ ID NO: 131 - DNA, 51 bp, Homo sapiens
gaaggtgtacagcagtttaagaagtrtaaatcctcccacacataccttatt

SEQ ID NO: 132 - DNA, 51 bp, Homo sapiens
ttctttttgcctaattgcaaacttaygatattcacaaagacacaaatctta

SEQ ID NO: 133 - DNA, 51 bp, Homo sapiens
aaggtctactttatttgtaattacgycaggcatgcatatgtacatctgtct

SEQ ID NO: 134 - DNA, 51 bp, Homo sapiens
tgccttctcttgaattcgaagaaackcagttgagccttttctaactcctcg

SEQ ID NO: 135 - DNA, 51 bp, Homo sapiens
ctttgagatttctctgtatggcaccrtggccgagagtgagaacatcccatt

SEQ ID NO: 136 - DNA, 51 bp, Homo sapiens
aattaaaaacaggatgaggaaaattyggtacattcatttgtatgcttcaat

SEQ ID NO: 137 - DNA, 51 bp, Homo sapiens
aaccaaagacagtatatctgtgaagmcttttccagtatttgttggtagaaa

SEQ ID NO: 138 - DNA, 51 bp, Homo sapiens
attgataggtgctgtccacaaaggtytggaatataaaaccagcactgctct

SEQ ID NO: 139 - DNA, 51 bp, Homo sapiens
gggttccagaaagagaaaatgtaagraagttgtcaaataaataatacaaca

SEQ ID NO: 140 - DNA, 51 bp, Homo sapiens
tgatctttgaaggctcaagttcaaaractaaggcaaagatagagggcagtt

SEQ ID NO: 141 - DNA, 51 bp, Homo sapiens
aagcagggaacttgcataatttgcartagagaaaataaaaagcaaacaaat

SEQ ID NO: 142 - DNA, 51 bp, Homo sapiens
tgtaattcatgttttatcaccattgrattttcaaaacggaaaataccttag

SEQ ID NO: 143 - DNA, 51 bp, Homo sapiens
aacctttgatcacaaagagatgacayattagcgcagtattttcattgagct

SEQ ID NO: 144 - DNA, 51 bp, Homo sapiens
gatgagtgaatagaaaagcaggaggrcattagaaggttgttataatcattt

SEQ ID NO: 145 - DNA, 51 bp, Homo sapiens
cctgttggcccctaagtcccctcgastttctttgtatcaccttcatgttac

SEQ ID NO: 146 - DNA, 51 bp, Homo sapiens
gcactgcaggagttacctactatttstcaatcttttttttcctttagccgc

SEQ ID NO: 147 - DNA, 51 bp, Homo sapiens
tagatactagaaacttctgctattgmtgacaaacaccaaataataaatgtg

SEQ ID NO: 148 - DNA, 51 bp, Homo sapiens
gatcacatggctctgttgttcttcayttgttttctgcaatcctgatgcctt

SEQ ID NO: 149 - DNA, 51 bp, Homo sapiens
ccagtgagtcaagccaagggtaccakgctatcgagacaatggcttaggcac

SEQ ID NO: 150 - DNA, 51 bp, Homo sapiens
gggctgacaggtagcactgaggtgastaagcacaaattaacacagtttcat

SEQ ID NO: 151 - DNA, 51 bp, Homo sapiens
gagaaatttagtgttgaggctcagcmcaggaatttgccaaacagataagaa

SEQ ID NO: 152 - DNA, 51 bp, Homo sapiens
atcatcttcaaggcttaatgccactygctggggagacaaaccaaagaattc

SEQ ID NO: 153 - DNA, 51 bp, Homo sapiens
attcagactggccttccactagggcyaactcatttcttcagggaacaccat

SEQ ID NO: 154 - DNA, 51 bp, Homo sapiens
ccaatgcttttgtcaatgtgagggcmtctaaaacctgagcttcagagatta

SEQ ID NO: 155 - DNA, 51 bp, Homo sapiens
gcatttgtgattaacaaagtatcacrtaactggacttctctagtccactca

SEQ ID NO: 156 - DNA, 51 bp, Homo sapiens
gtatagaatagttgctgtggcctgaragataaccagcacaatccacagcta

SEQ ID NO: 157 - DNA, 51 bp, Homo sapiens
ttggcattattaccaaggacccgaakaacatctaatttaggtggtacaagg

SEQ ID NO: 158 - DNA, 51 bp, Homo sapiens
gctgccttgggaactactatgttgcmtctacagctcctgtccttgaaagaa

SEQ ID NO: 159 - DNA, 51 bp, Homo sapiens
gaaaactaaacaaacactacggttamacagaaaccagatgtctctgctaca

SEQ ID NO: 160 - DNA, 51 bp, Homo sapiens
gatgatggagatgatggtgatgatgktgtgcctcaacccttccttcccaca

SEQ ID NO: 161 - DNA, 51 bp, Homo sapiens
agaattcctgtgtcactactgacttkggtatattatatttttacccaacca

SEQ ID NO: 162 - DNA, 51 bp, Homo sapiens
gtttttctaccacacctgcatgtacraaccctgctgctttttcaaggcttg

SEQ ID NO: 163 - DNA, 51 bp, Homo sapiens
gtactgttatcctaaagcaaggaaargtaacagaaatattgtcatcattga

SEQ ID NO: 164 - DNA, 51 bp, Homo sapiens
tgcatttttgcctattcccttatatktgtgctgtctccaaagcccaaaaga

SEQ ID NO: 165 - DNA, 51 bp, Homo sapiens
cgaatatgctcacttggtgtcccagmagcaatttgaactaaatatacccta

SEQ ID NO: 166 - DNA, 51 bp, Homo sapiens
aagcttgcccgtgaccatattatttrtgttgctagtaagagcttctcctgt

SEQ ID NO: 167 - DNA, 51 bp, Homo sapiens
cttcccttctgatgaaaatgttttaygtatgccgttcagtacctcaaaacc

SEQ ID NO: 168 - DNA, 51 bp, Homo sapiens
cttagaatttaagttgcaaaatctgkttctttcaggccaggagaaaccact

SEQ ID NO: 169 - DNA, 51 bp, Homo sapiens
gctctgtaaacctcacaaacgctcartctttttagtcaatcaatcctttgc

SEQ ID NO: 170 - DNA, 51 bp, Homo sapiens
gtagattaaaaaaataaataatgcargttcaactaaataccttctttggaa

SEQ ID NO: 171 - DNA, 51 bp, Homo sapiens
gaacctgtacccagctgaattgaacyacacaggaaaacacaaatcatgggc

SEQ ID NO: 172 - DNA, 51 bp, Homo sapiens
agttaccatggaaacagcatattctsctggtaaccagaatggagttttgga

SEQ ID NO: 173 - DNA, 51 bp, Homo sapiens
attctaatgctcagggtggatagaayaggcaaaaagtgctaggtaatgaag

SEQ ID NO: 174 - DNA, 51 bp, Homo sapiens
ctggcagccaaatatattcaagatartgtagattctactactttctctccc

SEQ ID NO: 175 - DNA, 51 bp, Homo sapiens
tcaaactggcagccaaatgtgatcaygagggctaggctatttattaagtag

SEQ ID NO: 176 - DNA, 51 bp, Homo sapiens
ttattctagctccttctcaagaggaygacgatgtgccagaggtagatgaga

SEQ ID NO: 177 - DNA, 51 bp, Homo sapiens
cctgaccattattaggttttccttcmtagcatgtctcttctacttctggaa

SEQ ID NO: 178 - DNA, 51 bp, Homo sapiens
agatggcataacagaatgtctgcccygggccacactgccaccagctgtgca

SEQ ID NO: 179 - DNA, 51 bp, Homo sapiens
cgagacacctcccactcgtccggcaygtacacagagcatggaaacactact

SEQ ID NO: 180 - DNA, 51 bp, Homo sapiens
gggatggtgtcccatccagggtgggytcttaccttgcaccctgtgctccag

SEQ ID NO: 181 - DNA, 51 bp, Homo sapiens
tttgtacttcttttttttaacaccayacataatcttcttagaatgaactgt

SEQ ID NO: 182 - DNA, 51 bp, Homo sapiens
ttttctgttcattaaacctcttaccrtaattccagtttaataatccatgca

SEQ ID NO: 183 - DNA, 51 bp, Homo sapiens
tcagctttgaatataaagagagaaarcaggagcatggcggtttatgtatat

SEQ ID NO: 184 - DNA, 51 bp, Homo sapiens
acattgttgttaaatctgggtatggraagtccctcagaatgaatagtcaat

SEQ ID NO: 185 - DNA, 51 bp, Homo sapiens
ttttagcagtggaatcttgctaaatyctccccattcctggccaatgttgta

SEQ ID NO: 186 - DNA, 51 bp, Homo sapiens
aaatatggatatcttctggagattgyagaaaaataaggcagagtcagctgt

SEQ ID NO: 187 - DNA, 51 bp, Homo sapiens
gtgagggaaaatggtaaaggctagtkaaaaaagaactctttctaacaaaat

SEQ ID NO: 188 - DNA, 51 bp, Homo sapiens
agaaacacagaatacagaatccttgmttaggatgaatccctgtaattatat

SEQ ID NO: 189 - DNA, 51 bp, Homo sapiens
tggagtcatttaatagctacttcacyttgatagtgtggtctctttccttct

SEQ ID NO: 190 - DNA, 51 bp, Homo sapiens
acaaccaaggtcccatccagctcaaygttcaggatttccagaagatgctca

SEQ ID NO: 191 - DNA, 51 bp, Homo sapiens
gtctgtgatgtcacatctaggagcayctacccatggacagacatgtcttcc

SEQ ID NO: 192 - DNA, 51 bp, Homo sapiens
aagtttggggtgagggttatcctctyactttgattagactccccacttctg

SEQ ID NO: 193 - DNA, 51 bp, Homo sapiens
tacaggcagcttaccaataggtcctrgagtttgcactaaaaagaaattcaa

SEQ ID NO: 194 - DNA, 51 bp, Homo sapiens
actaaaaaagattaaaagattaacaygtaaagagctgtacatttccaaaac

SEQ ID NO: 195 - DNA, 51 bp, Homo sapiens
tatgagaatagaatgttctagttttycttgttggcgtctgctgtggaaaat

SEQ ID NO: 196 - DNA, 51 bp, Homo sapiens
acatcttcaactttatagcattaccmcacagaagatatgctgatctatttt

SEQ ID NO: 197 - DNA, 51 bp, Homo sapiens
ggatataggaatggtgagaattttaygacagataaaaaagaagccaatggg

SEQ ID NO: 198 - DNA, 51 bp, Homo sapiens
gaagaagttggaggagaagacttgcrtgcccaggcttgctaaaaagcatgt

SEQ ID NO: 199 - DNA, 51 bp, Homo sapiens
gacttacttcttgttgagtgcattayctttattcattgcctccttaaaaat

SEQ ID NO: 200 - DNA, 51 bp, Homo sapiens
gatgatggctcatttatcaagaccakgctggaggctcagctaccagagctt

SEQ ID NO: 201 - DNA, 51 bp, Homo sapiens
aacctttgaatttgtatttgtctgartcatagaatttagaattataatggc

SEQ ID NO: 202 - DNA, 51 bp, Homo sapiens
acatatatttgcaaaatgcgtgctgkgcctgtttgatctaactgacttttt

SEQ ID NO: 203 - DNA, 51 bp, Homo sapiens
tgctagagttactcatttaccaccaytaaactctaggatagaagatgcagc

SEQ ID NO: 204 - DNA, 51 bp, Homo sapiens
gggactttcctacccaatatttgatraaccacttatgttatcttcttagat

SEQ ID NO: 205 - DNA, 51 bp, Homo sapiens
taattcaggaagagattctcccattktgtagacatagtgtgtggaatgttt

SEQ ID NO: 206 - DNA, 51 bp, Homo sapiens
cggtgagtgagattctgagggcaacygggcttctggaactcagccagcgct

SEQ ID NO: 207 - DNA, 51 bp, Homo sapiens
attaaaaggaagaacacagatggatstagagaaattgatcagaaattcaga

SEQ ID NO: 208 - DNA, 51 bp, Homo sapiens
aactcctcgccatcttcatcccctcyggcacgagcctccttcacccgcagg

SEQ ID NO: 209 - DNA, 51 bp, Homo sapiens
aattgaaagatcatccaagttggagraaaaaaattctcataacacaaattc

SEQ ID NO: 210 - DNA, 51 bp, Homo sapiens
gataaatcagcatttttacaaatacmtgctaagaagcctgagcttttaact

SEQ ID NO: 211 - DNA, 51 bp, Homo sapiens
tttggcttgctaacaagagctataamgtaggaatggagggtgtcagcatgc

SEQ ID NO: 212 - DNA, 51 bp, Homo sapiens
ctcctaacacgattaagtccttcttsgtatcttttctcatagcaacttgtc

SEQ ID NO: 213 - DNA, 51 bp, Homo sapiens
acacctaaaactgtgccagcagccasttggaactgcccagttctcactcac

SEQ ID NO: 214 - DNA, 51 bp, Homo sapiens
atatagacctgacttgggtactgttytttttggcaataactttagacaatg

SEQ ID NO: 215 - DNA, 51 bp, Homo sapiens
aatgtacattcaaaacaatcgaggtwggctttaaaggagcattcaaaatca

SEQ ID NO: 216 - DNA, 51 bp, Homo sapiens
aggctcagcttccggaaacaatgtcsaaaccacactgcaagcctggcctgt

SEQ ID NO: 217 - DNA, 51 bp, Homo sapiens
gtttaaacctgtaaacctgttttgayataaaagtcttcaaatttggtggag

SEQ ID NO: 218 - DNA, 51 bp, Homo sapiens
gtgagagccaccacgcccaactaaarcatactgttgtgtgaagatagaatt

SEQ ID NO: 219 - DNA, 51 bp, Homo sapiens
gcagacgtgtttccccggagcagtcrtaagttactttagctcctaaattta

SEQ ID NO: 220 - DNA, 51 bp, Homo sapiens
tctccaatggagtcactttttttagmcaaagctgattactccagcctaaaa

SEQ ID NO: 221 - DNA, 51 bp, Homo sapiens
gtctgtttctcatctctccaaatttwcagagttaacatattttatttctgc

SEQ ID NO: 222 - DNA, 51 bp, Homo sapiens
tggcattttccacccctttggacggyatcagcttgcacttctgctactgcc

SEQ ID NO: 223 - DNA, 51 bp, Homo sapiens
gagccgagttctttcttaaactgcckattacattcccaatcatctctgaaa

SEQ ID NO: 224 - DNA, 51 bp, Homo sapiens
gacctactctttctcttctcctctaytccattttacagatgaaaaagctga

SEQ ID NO: 225 - DNA, 51 bp, Homo sapiens
tattcccacttgcactgaccttcccrtaggactaacttgaagtcttcacca

SEQ ID NO: 226 - DNA, 51 bp, Homo sapiens
gctttttgtgaattcaattgattggrccagaagtgaacatatgatattgaa

SEQ ID NO: 227 - DNA, 51 bp, Homo sapiens
taggcacggaggacagaacttccaargctctagtgtcagggatgccctgag

SEQ ID NO: 228 - DNA, 51 bp, Homo sapiens
ccgtatttaagtggtcacacaataayaacgtcatagtaggcatatcccacc

SEQ ID NO: 229 - DNA, 51 bp, Homo sapiens
ggtttttgtttgcttttgtttttaayagagtataccactgaaacttttgaa

SEQ ID NO: 230 - DNA, 51 bp, Homo sapiens
tgcctcctacctcactttgggtcccrtacatagttgcttctaacaacttca

SEQ ID NO: 231 - DNA, 51 bp, Homo sapiens
ccagaagagcccacccttgagagaayaggtgcctgggagtcctgtgcccac

SEQ ID NO: 232 - DNA, 51 bp, Homo sapiens
tcagtttgctgcagagtacacctttyctgggacaatgctaaacttgtaagt

SEQ ID NO: 233 - DNA, 51 bp, Homo sapiens
gttgggggacagctgatggccaggcrggcattcacagcggtaacttccctc

SEQ ID NO: 234 - DNA, 51 bp, Homo sapiens
gacggaactcctgcattccagagttyagtggtaaaaagaacactttatgta

SEQ ID NO: 235 - DNA, 51 bp, Homo sapiens
ttcagtataaagtaactctctggaarttgacatgaagtttgatcagaaatt

SEQ ID NO: 236 - DNA, 51 bp, Homo sapiens
catagctctaccacaaaaagttctcwctatatatacctttagagcattaag

SEQ ID NO: 237 - DNA, 51 bp, Homo sapiens
gaactccttggaaattggtattaatrttgaatctccttaaggtagaatttt

SEQ ID NO: 238 - DNA, 51 bp, Homo sapiens
catcccaagtactaagattatcatcyaaggaagcataatgctagaaagcaa

SEQ ID NO: 239 - DNA, 51 bp, Homo sapiens
gaacaacatagggtcaagcaacccarccttttctcatgaactggtgaccct

SEQ ID NO: 240 - DNA, 51 bp, Homo sapiens
aaattaagaaggtctgaactaatacrtgagaagaatcccataaaaacaatt

SEQ ID NO: 241 - DNA, 51 bp, Homo sapiens
tgattaacaattctgagagccagccrtgttggccactaatatcagattttt

SEQ ID NO: 242 - DNA, 51 bp, Homo sapiens
tttctgtgaagagggctgcagatacrgtggaacgtgtgtggctcccaacaa

SEQ ID NO: 243 - DNA, 51 bp, Homo sapiens
aggtcaccagtgaccccaacctatgstctcggtctttcctggaggctgcca

SEQ ID NO: 244 - DNA, 51 bp, Homo sapiens
accactcatttttattgcctgatackgtgttctagtcccctagggtgggca

SEQ ID NO: 245 - DNA, 51 bp, Homo sapiens
cattttgtactctccaatgcgggaakggagtgcactgaactagtaataacc

SEQ ID NO: 246 - DNA, 51 bp, Homo sapiens
taaatactgcacaaggcactgagagrgaattaacatctggaatggcctttt

SEQ ID NO: 247 - DNA, 51 bp, Homo sapiens
gctctgggctcccagttgtgacactrtggagtggaagaggaggagaaaggc

SEQ ID NO: 248 - DNA, 51 bp, Homo sapiens
ggtactgatggtcttatgggtgtatrtccccccaaatttgtatgttaaagc

SEQ ID NO: 249 - DNA, 51 bp, Homo sapiens
tggatgaaagaaatactccagacacrccgacatcaggcaatagtatcctaa

SEQ ID NO: 250 - DNA, 51 bp, Homo sapiens
tgtgttttctcacaattatccaacaytttaacaagcagaggtgtcacgata

SEQ ID NO: 251 - DNA, 51 bp, Homo sapiens
tcatgctggcaggtggctgataaccyggaaacactagctgggtagactgac

SEQ ID NO: 252 - DNA, 51 bp, Homo sapiens
taggttagactaaagccttacatctyttcttccaataatctctatataaat

SEQ ID NO: 253 - DNA, 51 bp, Homo sapiens
aagatcttcagcaccccggaggcacstggggagcacggcctggcaccatgg

SEQ ID NO: 254 - DNA, 51 bp, Homo sapiens
tttttctttgagatgttcaccattartgagcattctccctattgcaatagc

SEQ ID NO: 255 - DNA, 51 bp, Homo sapiens
ttcccagaggcagagcctgagtcacyggtcacccttaatatttattaagtg

SEQ ID NO: 256 - DNA, 51 bp, Homo sapiens
tttagtgaaaaaaaattagtcaaacyagatgtgtctctgtgtaactttctt

SEQ ID NO: 257 - DNA, 51 bp, Homo sapiens
ggtgaaactgtagccaaaactcttayaaattctatggtggacatttggtga

SEQ ID NO: 258 - DNA, 51 bp, Homo sapiens
ttttgttatatatagctatacttaayccttaccgatacaacttctctatca

SEQ ID NO: 259 - DNA, 51 bp, Homo sapiens
ggggtgggaggaagaatcagatcagytctatctggcaaagcctcagaaaat

SEQ ID NO: 260 - DNA, 51 bp, Homo sapiens
acatatcctactatcattccagaaayagtatgcttgcagtttattttttgt

SEQ ID NO: 261 - DNA, 51 bp, Homo sapiens
ctcccttccaaccaccacatctcttscaatccaacaaaggagcaaatgcat

SEQ ID NO: 262 - DNA, 51 bp, Homo sapiens
agaggtcagcatccaattcagcctgyggttctctgtggtttaactgccagc

SEQ ID NO: 263 - DNA, 51 bp, Homo sapiens
tgtcctggcctatatgctatagaggyccccatttccggtcctcctctggcc

SEQ ID NO: 264 - DNA, 51 bp, Homo sapiens
aaactttatttagctttttctggcgygtaaactaacatactaagttgtgtg

SEQ ID NO: 265 - DNA, 51 bp, Homo sapiens
acaggcatggatcagttcaggaaggsactcgatggaggtccgacccctagc

SEQ ID NO: 266 - DNA, 51 bp, Homo sapiens
taaaaataaagaaaatcatcaatgamtgtggtggatgggatttcagaaaaa

SEQ ID NO: 267 - DNA, 51 bp, Homo sapiens
tatggctgaccaggggcatctttacrcattgaactctcaggtcacaagtat

SEQ ID NO: 268 - DNA, 51 bp, Homo sapiens
cctcatggtcaaactgtggctctctstcctgaattccatgtaaatggagag

SEQ ID NO: 269 - DNA, 51 bp, Homo sapiens
aagtgctcgtgccttttcgtttaggkcttggaattctggctctggtcgttc

SEQ ID NO: 270 - DNA, 51 bp, Homo sapiens
aagtacaaaattgtaggtggcaaatygataccctgagggctgcatatttta

SEQ ID NO: 271 - DNA, 51 bp, Homo sapiens
aatctgaataaaataaaactgcctaygaattagtttacaattattaaaatt

SEQ ID NO: 272 - DNA, 51 bp, Homo sapiens
taccggaaagagcccaaagccaagtsggacaagtatctgaagcagcagcag

SEQ ID NO: 273 - DNA, 51 bp, Homo sapiens; identical to SEQ ID NO: 22

SEQ ID NO: 274 - DNA, 51 bp, Homo sapiens
gaaacggttcctccaccattacgatmtgaactaaaacaataagaagatgct

SEQ ID NO: 275 - DNA, 51 bp, Homo sapiens
ctttttctcatttatatggaggatcrtatacatttcagtagtatttgcatg

SEQ ID NO: 276 - DNA, 51 bp, Homo sapiens
tcagaattttagttatgaactgtgtrcaactacaacaaatagagtcagtag

SEQ ID NO: 277 - DNA, 51 bp, Homo sapiens
ctgtcacattagccctgtctggctgktacctacctaatttgagcttctttc

SEQ ID NO: 278 - DNA, 51 bp, Homo sapiens; identical to SEQ ID NO: 101

SEQ ID NO: 279 - DNA, 51 bp, Homo sapiens
atgtgacttttcagcatgaggatacrttttctggtatttgttctagtaggt

SEQ ID NO: 280 - DNA, 51 bp, Homo sapiens
catgaaagtcattgagagtcgagccmaaaaagatgaagaaaaaatggaaat

SEQ ID NO: 281 - DNA, 51 bp, Homo sapiens
agactggtggagcagtcccggcttcrccattcagaagatcagagtaaaagc

SEQ ID NO: 282 - DNA, 51 bp, Homo sapiens; identical to SEQ ID NO: 165

SEQ ID NO: 283 - DNA, 51 bp, Homo sapiens; identical to SEQ ID NO: 255

SEQ ID NO: 284 - DNA, 51 bp, Homo sapiens
gagcccttcctgagtcccatccattsgcagggtcctactgttgtccgcccc

SEQ ID NO: 285 - DNA, 51 bp, Homo sapiens
tggatctcgagccagaggggaaagtrtttgtggtaataacccttaccggga

SEQ ID NO: 286 - DNA, 51 bp, Homo sapiens
caaacaaggcatagatgggacctacytcaaataataataactatgtatgac

SEQ ID NO: 287 - DNA, 51 bp, Homo sapiens
attcttacctcccatccataactggrgtctttcaggtttgacctctgctct

SEQ ID NO: 288 - DNA, 51 bp, Homo sapiens; identical to SEQ ID NO: 9

SEQ ID NO: 289 - DNA, 51 bp, Homo sapiens
tgacccgtgtttggggcaataaggtmataaattcgggcaaaaagggtaaga

SEQ ID NO: 290 - DNA, 51 bp, Homo sapiens
ctatgataagtcaagaaaggagactrtaactatggatgacagacaagttcc

SEQ ID NO: 291 - DNA, 51 bp, Homo sapiens
aaatacagcttgctataaataaatgycatttgctttaggctaaatctgtat

SEQ ID NO: 292 - DNA, 51 bp, Homo sapiens
tggaaggaataaataccagacaccayagggactccctgaggactttgatca

SEQ ID NO: 293 - DNA, 51 bp, Homo sapiens
agtggtcagggatcctctgtcttcayagaatctcgagtgagcagccaacag

SEQ ID NO: 294 - DNA, 51 bp, Homo sapiens
tagagaaatgtagaccaagcttgagrttgaagtgagcatgtgtagcattgt

SEQ ID NO: 295 - DNA, 51 bp, Homo sapiens
taaatcattttctagaaggaatttcrgaaggatgtgtgcccaattatggta

SEQ ID NO: 296 - DNA, 51 bp, Homo sapiens
atatgatcactctgaaatattcacascagtccacttcctggctccccaaag

SEQ ID NO: 297 - DNA, 51 bp, Homo sapiens
gtgaccactgacttttcaagaggtgygaggacaaggccagatgaccataga

SEQ ID NO: 298 - DNA, 51 bp, Homo sapiens
cctgtggagggggtgctaagggtccrgaaggacgtggagctggaccgggag

SEQ ID NO: 299 - DNA, 51 bp, Homo sapiens
aagacattagtgttattacagattaygaaacaggcatgagaggctaagtaa

SEQ ID NO: 300 - DNA, 51 bp, Homo sapiens
agattctgtcatcattcacaagatayacattgcctgaacctttgatccata

SEQ ID NO: 301 - DNA, 51 bp, Homo sapiens
actaagtaaaatgaataagttacagyaggattgctttccctaaatgttatg

SEQ ID NO: 302 - DNA, 51 bp, Homo sapiens
acagagacactgtagatgtgcatatytgtctctagttgtgagaacatacaa

SEQ ID NO: 303 - DNA, 51 bp, Homo sapiens
cttctgatgctctggtttatttgacyggtttgacgtctgatcagttagcgg

SEQ ID NO: 304 - DNA, 51 bp, Homo sapiens
aagttaacctttacagcaatttgttwagtagtttaagcattctagaagcta

SEQ ID NO: 305 - DNA, 51 bp, Homo sapiens
caaacacgcagcatgtattatgtgckgagttaacaccccttagtgtcatta

SEQ ID NO: 306 - DNA, 51 bp, Homo sapiens; identical to SEQ ID NO: 136

SEQ ID NO: 307 - DNA, 51 bp, Homo sapiens; identical to SEQ ID NO: 66

SEQ ID NO: 308 - DNA, 51 bp, Homo sapiens
cctgtctcattcaagttgtatagtaygaaatagcattattggaagttttct

SEQ ID NO: 309 - DNA, 51 bp, Homo sapiens
tcatgaaacatgtcataatagtgctrgagcacacaactataggatggttat

SEQ ID NO: 310 - DNA, 51 bp, Homo sapiens
gtttttcccttccagcttgaatcatraagagcttcagaataacattggttt

SEQ ID NO: 311 - DNA, 51 bp, Homo sapiens
aatgatttctaaaattacaagttacrtggcctaaataaatactatcaaaat

SEQ ID NO: 312 - DNA, 51 bp, Homo sapiens
ctgagaattggtctgactccatcagygccattgctggtggaatgtttcatt

SEQ ID NO: 313 - DNA, 51 bp, Homo sapiens
ctccatgcggactccagccgccatgygcttggtgccggagtctgacaagct

SEQ ID NO: 314 - DNA, 51 bp, Homo sapiens
gaagtttctgcaaaacacacgccagmttgttcaagaagatcctgttgggcc

SEQ ID NO: 315 - DNA, 51 bp, Homo sapiens
tagctgtcggacttccaggcaaacayctgtcaacgctcactcatccaggag

SEQ ID NO: 316 - DNA, 51 bp, Homo sapiens
ttgttacacagaactccttcacagtsctttctctttcgaggttgaatcgtg

SEQ ID NO: 317 - DNA, 51 bp, Homo sapiens
ttattatgtctcacataggaagctgktaggtatctttctgagagcatcttg

SEQ ID NO: 318 - DNA, 51 bp, Homo sapiens
gggctggtagctgaagcagaaatcarttatgcctgtgttgtttgtctccca

SEQ ID NO: 319 - DNA, 51 bp, Homo sapiens
tttacctccgtgcttagaagttcaayggaaaagcatctggaagaaaagccc

SEQ ID NO: 320 - DNA, 51 bp, Homo sapiens
atgagaaagtattgtttcttgtgagygtgtaaaatttcactttttatatgg

SEQ ID NO: 321 - DNA, 51 bp, Homo sapiens
tcacagataaattcatggcgctttarcacaagtatggaacttcacattata

SEQ ID NO: 322 - DNA, 51 bp, Homo sapiens
aaacctctgagcctaacattccttgyctgtaagatcgggattcattctcat

SEQ ID NO: 323 - DNA, 51 bp, Homo sapiens
gaacattcatttcggaatggcctcastatctgaagaaaataaacagtacag

SEQ ID NO: 324 - DNA, 51 bp, Homo sapiens
aggacgaggggcatcgtcccttgctstggcactccatgcggactccagccg

SEQ ID NO: 325 - DNA, 51 bp, Homo sapiens
cctggccttcttcctgacggccactrtcttcctcgtgctctgcatgggact

SEQ ID NO: 326 - DNA, 51 bp, Homo sapiens
tcacttcctcaattttcctctggggraaaatacatgtccatgtgcagcatc

SEQ ID NO: 327 - DNA, 51 bp, Homo sapiens
aatttggtgactatacttgcactatyctaactcagaaatacaatagcttta

SEQ ID NO: 328 - DNA, 51 bp, Homo sapiens
gctctacagaggtcaggacacagctyggggtcacggcgcaaaccttcaagc

SEQ ID NO: 329 - DNA, 51 bp, Homo sapiens
caggtaagtgcagaaagaaaatgccrtaccccacgcagcagcctctggaga

SEQ ID NO: 330 - DNA, 51 bp, Homo sapiens
gcaggggctcaagcaataactctgcytacatgttagttttctggtgggtag

SEQ ID NO: 331 - DNA, 51 bp, Homo sapiens; identical to SEQ ID NO: 82

SEQ ID NO: 332 - DNA, 51 bp, Homo sapiens
gtatttgcagccagtcaccaagtttycaagccctcacctgcggcctgtgag

SEQ ID NO: 333 - DNA, 51 bp, Homo sapiens
aatttgaaaccaaaatcctgaaccaygcatttcaacctagaagcctttgta

SEQ ID NO: 334 - DNA, 51 bp, Homo sapiens
accttatagcagactatgaatttggrgctaattgaaatagagacttttggg

SEQ ID NO: 335 - DNA, 51 bp, Homo sapiens
agagtaaaagatcaggatcctctcaytcagttgtgtttttcttattcttta

SEQ ID NO: 336 - DNA, 51 bp, Homo sapiens
tatcttaatacttcattactataccrcacaggctctcaaatcgtttgcagg

SEQ ID NO: 337 - DNA, 51 bp, Homo sapiens
aaggctcaacacacagcttggagtayccagattgtattctagaacctatag

SEQ ID NO: 338 - DNA, 51 bp, Homo sapiens
atttaatgtagggagcaaccactagygtacatgatctcagctcatctggta

SEQ ID NO: 339 - DNA, 51 bp, Homo sapiens; identical to SEQ ID NO: 8

SEQ ID NO: 340 - DNA, 51 bp, Homo sapiens
ccaatctctgctttgcagtctctcarcagaaataaatttccactcttccct

SEQ ID NO: 341 - DNA, 51 bp, Homo sapiens
gaggcggcctctatacaatgctgtgytcatattaggctgactcattcattc

SEQ ID NO: 342 - DNA, 51 bp, Homo sapiens; identical to SEQ ID NO: 3

SEQ ID NO: 343 - DNA, 51 bp, Homo sapiens
agatgaagacactatccctcctttargaagttcacggtctagtgaccgacg

SEQ ID NO: 344 - DNA, 51 bp, Homo sapiens
cttggtctttacaactggggctactrtggtggataatcgcatttctgaagt

SEQ ID NO: 345 - DNA, 51 bp, Homo sapiens
gaataaatgaacaatgtgagctaaaygtttccagagaactatggtagagac

SEQ ID NO: 346 - DNA, 51 bp, Homo sapiens; identical to SEQ ID NO: 31

SEQ ID NO: 347 - DNA, 51 bp, Homo sapiens
agttttatccattaactctttcagaygattcactttatcaaactgcctaaa

SEQ ID NO: 348 - DNA, 51 bp, Homo sapiens; identical to SEQ ID NO: 99

SEQ ID NO: 349 - DNA, 51 bp, Homo sapiens; identical to SEQ ID NO: 4

SEQ ID NO: 350 - DNA, 51 bp, Homo sapiens
acagtggagactggcacagtgaaccyggggctggagctcatggtaatcacc

SEQ ID NO: 351 - DNA, 51 bp, Homo sapiens
agtgtgttcttctgcaccaactcacrtattccattttgtgcctttacaaaa

SEQ ID NO: 352 - DNA, 51 bp, Homo sapiens
tgcagtcataaccagcttagaagccrgcccttaatctcatgagcaccacct

SEQ ID NO: 353 - DNA, 51 bp, Homo sapiens
cccgacctcactcagcatctgtggarttcaattatatcaggatccacaata

SEQ ID NO: 354 - DNA, 51 bp, Homo sapiens
aactccagcactgagaatctgttccygagaaagggtgtggtcatctgctag

SEQ ID NO: 355 - DNA, 51 bp, Homo sapiens; identical to SEQ ID NO: 95

SEQ ID NO: 356 - DNA, 51 bp, Homo sapiens
tctggtctggccaatcacgatgcacragaagcactgaatttagtgtatctt

SEQ ID NO: 357 - DNA, 51 bp, Homo sapiens; identical to SEQ ID NO: 242

SEQ ID NO: 358 - DNA, 51 bp, Homo sapiens
ctacactctgccctccttatctccargattcatttctaactaacacagtct

SEQ ID NO: 359 - DNA, 51 bp, Homo sapiens
tccacagtcagaagacacgctagacraagggcgtccatccagtctcagccc

SEQ ID NO: 360 - DNA, 51 bp, Homo sapiens
gagatccagttttgttcatctcttcrcaactccacattcggtgatatcaca

SEQ ID NO: 361 - DNA, 51 bp, Homo sapiens
gaatgtttctcatacgaatgtttttsttattgaagaatgccatagaaataa

SEQ ID NO: 362 - DNA, 51 bp, Homo sapiens; identical to SEQ ID NO: 153

SEQ ID NO: 363 - DNA, 51 bp, Homo sapiens
tctccatctaaccataagttctttgytctgtttgatgaacaaatggctcct

SEQ ID NO: 364 - DNA, 51 bp, Homo sapiens
gtaggcaaaggaatgtctgtacacaraggctaccaggctaccatttgcctt

SEQ ID NO: 365 - DNA, 51 bp, Homo sapiens
cccagaggaaacgggaaagaaaattyactccctaaggataaggatcctacc

SEQ ID NO: 366 - DNA, 51 bp, Homo sapiens
ctcagtaaatgatgcccccatatgtraaaaacacagcatggaacctgacac

SEQ ID NO: 367 - DNA, 51 bp, Homo sapiens
ttctaaagtatctgaatccagtgcayactttcttgctaacagacaaattct

SEQ ID NO: 368 - DNA, 51 bp, Homo sapiens
tgatgtcagtaagaaagattagttaygaagttaatgtataactttgcaaga

SEQ ID NO: 369 - DNA, 51 bp, Homo sapiens
gcaaacagaggtagcggtggtagctytgatctcaggagcacctcggccttg

SEQ ID NO: 370 - DNA, 51 bp, Homo sapiens
ataagtgacccatatcctaaaactgrccacaatacaaacataacactgaaa

SEQ ID NO: 371 - DNA, 51 bp, Homo sapiens
gggctgagctgggtccagttcatccrtgtgaccttactgcccagccagggc

SEQ ID NO: 372 - DNA, 51 bp, Homo sapiens
aaggcttcaaactcctgagaaaaaamacagtttcagctaaaattctatacc

SEQ ID NO: 373 - DNA, 51 bp, Homo sapiens
atgaaaggtattaatcagtcatttcyggctctttatgtacaagtggttcat

SEQ ID NO: 374 - DNA, 51 bp, Homo sapiens; identical to SEQ ID NO: 175

SEQ ID NO: 375 - DNA, 51 bp, Homo sapiens
caaattagccgtttacagaatatccrgaataccattgaagagactggaaac

SEQ ID NO: 376 - DNA, 51 bp, Homo sapiens
caggagggagaggtgtccgggggccrctgctgggtgacccgccatgctgtg

SEQ ID NO: 377 - DNA, 51 bp, Homo sapiens
ttattagcttacccttttagataagsagaagtctgttttgttgagtaccct

SEQ ID NO: 378 - DNA, 51 bp, Homo sapiens
tctcccctattaaacctggctcttgraaagactgtcaacttgctctcattg

SEQ ID NO: 379 - DNA, 51 bp, Homo sapiens
taagattttaaaattgtttatgttgrcaaaggtgctataaaatgtacactc

SEQ ID NO: 380 - DNA, 51 bp, Homo sapiens
tattgtggtataaattatttctgttraaaagactaaaagtgaagcttatat

SEQ ID NO: 381 - DNA, 51 bp, Homo sapiens
tagatttgcgagatcttggtgtaaasgtaataactgagccacctagagaga

SEQ ID NO: 382 - DNA, 51 bp, Homo sapiens
agcagctgatcttttcatttcctctycaagttctatgatataaagtagtat

SEQ ID NO: 383 - DNA, 51 bp, Homo sapiens
cataaaaaggtttatcacacaaaccyagaaagagccttaaggttcattact

SEQ ID NO: 384 - DNA, 51 bp, Homo sapiens
cattattcagctgtcaaactttaacmtccacatcatcctcttcaatgtaac

SEQ ID NO: 385 - DNA, 51 bp, Homo sapiens
ttggagggacggctcttgttatagaygaggaagtctgagatgtcgtgccat

SEQ ID NO: 386 - DNA, 51 bp, Homo sapiens
catcaccagcctcatctaccccgccrtctgcaccaacatcgagtccctcaa

SEQ ID NO: 387 - DNA, 51 bp, Homo sapiens
ggggttccaatatgaacaaaagccartaattcccttcatagctaactagca

SEQ ID NO: 388 - DNA, 51 bp, Homo sapiens
caaatagtcctccaggttctgtttcrgcctgccttcttccctagtagaccc

SEQ ID NO: 389 - DNA, 51 bp, Homo sapiens
tgggagcctcactctcaggcggtccstctcccagtgttacagagtcctggc

SEQ ID NO: 390 - DNA, 51 bp, Homo sapiens
agtgctggataactgttggctgttasgatcgaatagagcagttattactgt

SEQ ID NO: 391 - DNA, 51 bp, Homo sapiens
ctgaactacactgtggccggctccasttttgtctttggggatacactggtc

SEQ ID NO: 392 - DNA, 51 bp, Homo sapiens
cctctcttacctattggcaatgtctrtaaagacacagctcacctctttctt

SEQ ID NO: 393 - DNA, 51 bp, Homo sapiens
agagcctaagcaaatgtctgctggcmaagatgtggtccccggatttagggg

SEQ ID NO: 394 - DNA, 51 bp, Homo sapiens
atgtgtaccacatgggaccagttgaractgttggacctgactgaggctgtt

SEQ ID NO: 395 - DNA, 51 bp, Homo sapiens
tttggtctatttaatatatgtgcctsgatgaaaaaaacaccttttgccaca

SEQ ID NO: 396 - DNA, 51 bp, Homo sapiens
ctggatggggttttctgtccatcctrtgcagtatttgggaaagttcacaag

SEQ ID NO: 397 - DNA, 51 bp, Homo sapiens
ttataacagcttgcattgcattcccsctaatttgagaatttctatgtcctc

SEQ ID NO: 398 - DNA, 51 bp, Homo sapiens
ttaatttttccaaagggtaattgaaytattctgaagttgaatgcatggttt

SEQ ID NO: 399 - DNA, 51 bp, Homo sapiens
tttaggggtcactgtcttagaaaagraggaaaatcagtggaggtctagcca

SEQ ID NO: 400 - DNA, 51 bp, Homo sapiens
tgaaatgtgctctgtgctcagaaggrgctcacccaatatacataactttat

SEQ ID NO: 401 - DNA, 51 bp, Homo sapiens
ccctcctggctgcctcaccatcaggkgcgggatgaggagctcagcctcagc

SEQ ID NO: 402 - DNA, 51 bp, Homo sapiens
catggctagactaaaaatagctttaygcttcctaaaacttaaaggccttcc

SEQ ID NO: 403 - DNA, 51 bp, Homo sapiens
ccggtctgtaaagtttctatgaagaygacataccagttaagagtctttggg

SEQ ID NO: 404 - DNA, 51 bp, Homo sapiens
tgaccaggtcaagctactatatctckataggtctcaatgttcttaactctt

SEQ ID NO: 405 - DNA, 51 bp, Homo sapiens
cctgtgcccagggacccgggagtctmacctctgcctgttgagggacgcgtt

SEQ ID NO: 406 - DNA, 51 bp, Homo sapiens
ataaccttgattccaatcttatgagrtaggcttttttataatataagtgga

SEQ ID NO: 407 - DNA, 51 bp, Homo sapiens
ataaaattatagagaaagttgattayccccgggatgaaaatggagaaattg

SEQ ID NO: 408 - DNA, 51 bp, Homo sapiens
gaagctgccgtcatggcagtgcctcrtactgcagaccaggacactagcaca

SEQ ID NO: 409 - DNA, 51 bp, Homo sapiens
ccagccactggctgcgcttcatttcytgcagaagctcagttacttgggtac

SEQ ID NO: 410 - DNA, 51 bp, Homo sapiens
tgtcctgcagagacagtaattgctgyccttttccgccaacagacctggagg

SEQ ID NO: 411 - DNA, 51 bp, Homo sapiens
aatccaggtgctgtttctccaacttyaggttcttgaacaaatgcagtcact

SEQ ID NO: 412 - DNA, 51 bp, Homo sapiens; identical to SEQ ID NO: 37

SEQ ID NO: 413 - DNA, 51 bp, Homo sapiens
acttttgactctgagttcagtgcccrtcacagtggcctcggatgccctctt

SEQ ID NO: 414 - DNA, 51 bp, Homo sapiens
acccggtataattttcaccaagtccwtttccttgatttcactaagatgcaa

SEQ ID NO: 415 - DNA, 51 bp, Homo sapiens; identical to SEQ ID NO: 2

SEQ ID NO: 416 - DNA, 51 bp, Homo sapiens
gttccagatcatcctgaagtcaggasggataatgcatggcaagttttccct

SEQ ID NO: 417 - DNA, 51 bp, Homo sapiens
agggcagtgattagggcgtcatccasgcatggcctgactgtcccaatgctg

SEQ ID NO: 418 - DNA, 51 bp, Homo sapiens
ttgttgacaaatcagtcttatctttsggacaaatggaattatcaacactct

SEQ ID NO: 419 - DNA, 51 bp, Homo sapiens
ctatttctcaaggatatagctggagygcttttttgtctaagcctcattctt

SEQ ID NO: 420 - DNA, 51 bp, Homo sapiens; identical to SEQ ID NO: 94

SEQ ID NO: 421 - DNA, 51 bp, Homo sapiens
caggaataacagagcatggggatgartaaacaggtttgcctttcgctactg

SEQ ID NO: 422 - DNA, 51 bp, Homo sapiens; identical to SEQ ID NO: 216

SEQ ID NO: 423 - DNA, 51 bp, Homo sapiens
tgattgttcaaatggcacagactctsacaggggttcaatctaccattgtgt

SEQ ID NO: 424 - DNA, 51 bp, Homo sapiens
ttctaaccataataaagtagtatcartatggtaggttgagtattctaacat

SEQ ID NO: 425 - DNA, 51 bp, Homo sapiens
aggataagcccagtgcttacaatctyaagaaacattaagagacagagaggc

SEQ ID NO: 426 - DNA, 51 bp, Homo sapiens; identical to SEQ ID NO: 11

SEQ ID NO: 427 - DNA, 51 bp, Homo sapiens
gttgtgatcatagggaatagaggatscaactacgatggaattgtatttgca

SEQ ID NO: 428 - DNA, 51 bp, Homo sapiens
gtccccaaacagagcatacgggattyccactgtattcgggagagttatgaa

SEQ ID NO: 429 - DNA, 51 bp, Homo sapiens
ttataacggccaccaccaacaaaatrtttacaaccacagttaatagttttg

SEQ ID NO: 430 - DNA, 51 bp, Homo sapiens
tgtacctcataaaaagcacatagctrgatgttaaacattatagagcctcta

SEQ ID NO: 431 - DNA, 51 bp, Homo sapiens
aagagccatttttgcagaattgtagktggctctgatcaaaagatgtgtcac

SEQ ID NO: 432 - DNA, 51 bp, Homo sapiens
tctatacagacacagccacacttacrgagccacctctgagagctgctgctt

SEQ ID NO: 433 - DNA, 51 bp, Homo sapiens
ccataggacatctgccataaaagggyctgcatgttggctgcatttcccgtg

SEQ ID NO: 434 - DNA, 51 bp, Homo sapiens
tacacatgtggcaaatggattgagaygtgagagatctggctgcaaggtgtc

SEQ ID NO: 435 - DNA, 51 bp, Homo sapiens
gttttgtattttgaaagcatcctccmtgggcttttaactaatctctcaatc

SEQ ID NO: 436 - DNA, 51 bp, Homo sapiens
gagaaccttgaaaaagtaaactgtgytcttttaggtcgacatggggggatg

SEQ ID NO: 437 - DNA, 51 bp, Homo sapiens
caaatgtcgggattgtttctgccaartgagtaaaattgccattatcatgct

SEQ ID NO: 438 - DNA, 51 bp, Homo sapiens
agcagattagcaaaaaattaaacagkctgtcaaatgttgatgaagacagag

SEQ ID NO: 439 - DNA, 51 bp, Homo sapiens
accaggggtgcttcaaagattctaasaagcaagaaaggctgaaactgccct

SEQ ID NO: 440 - DNA, 51 bp, Homo sapiens
aacatatatgagttaaaccaatagarcattctgtcctaaggctgctttccc

SEQ ID NO: 441 - DNA, 51 bp, Homo sapiens
cttatcacttggcctaggcaagcacrgaatgcccatgttccagggagctga

SEQ ID NO: 442 - DNA, 51 bp, Homo sapiens
ggtgtgtgtataaactgcttacataygcagcctaaagggagtgatttctgt

SEQ ID NO: 443 - DNA, 51 bp, Homo sapiens
gtggctacagattaaagggtcagtcrttgaaacattgctgggatcactgct

SEQ ID NO: 444 - DNA, 51 bp, Homo sapiens
agctggacaccagccagcaattcttycggctctactcgctggagatgagga

SEQ ID NO: 445 - DNA, 51 bp, Homo sapiens
agaagttaacggcctctgaagtgctscatgaaaggctatgataattttatt

SEQ ID NO: 446 - DNA, 51 bp, Homo sapiens
ccacctctgtgctggtgaggacatgsgatctgctgtgctgtgggcatctgg

SEQ ID NO: 447 - DNA, 51 bp, Homo sapiens
ctcctactcgaatgtcttattttctwtttaacataatctagtagatgaaaa

SEQ ID NO: 448 - DNA, 51 bp, Homo sapiens
caagggtgaagatcaacactcaatcmgggcagtccagcttcccagcttagt

SEQ ID NO: 449 - DNA, 51 bp, Homo sapiens
gggaccataaaactattaatcaaacmattaaaaagagatgaggctattctc

SEQ ID NO: 450 - DNA, 51 bp, Homo sapiens
gcatgaacttgagcacctgagtcccktgaatgctgctaaggataggatgga

SEQ ID NO: 451 - DNA, 51 bp, Homo sapiens
agatttgtttttctcagtgcaaagargaacattttgtgatttttttttatt

SEQ ID NO: 452 - DNA, 51 bp, Homo sapiens
tattttaatcttaacttttcttcaaycttggaataccaaaaaaaatttgaa

SEQ ID NO: 453 - DNA, 51 bp, Homo sapiens
cctcttccacactattttggtaaacrggaccagcatttattcagtcgccta

SEQ ID NO: 454 - DNA, 51 bp, Homo sapiens
gaagactgagaagttgtatgctgacygattccctcagtacatgtagaatga

SEQ ID NO: 455 - DNA, 51 bp, Homo sapiens
ttctcctgtatccagaggtttgttcrtaagtcaataggtgatctgaggcta

SEQ ID NO: 456 - DNA, 51 bp, Homo sapiens
ggaagcttgttgctcctatatttgtyccgttgctttgggttcatcctggtc

SEQ ID NO: 457 - DNA, 51 bp, Homo sapiens
cttttctttcataccagcactgcctrtggccctcaaatacctatcagtaat

SEQ ID NO: 458 - DNA, 51 bp, Homo sapiens
cctgctcaggggtgagttcaggagaygactgcgcaaacaataatgacaatg

SEQ ID NO: 459 - DNA, 51 bp, Homo sapiens
tgtttgtctagaaaatgtaaaagaarataacaacaattttgagcaacggga

SEQ ID NO: 460 - DNA, 51 bp, Homo sapiens
agtgtgtagaaaaatgtggatatgtrtaaaaatttgtatctttgggcagct

SEQ ID NO: 461 - DNA, 51 bp, Homo sapiens; identical to SEQ ID NO: 36

SEQ ID NO: 462 - DNA, 51 bp, Homo sapiens; identical to SEQ ID NO: 202

SEQ ID NO: 463 - DNA, 51 bp, Homo sapiens
gcctgactgagtctaataactagaaygctcagataactacacttacctaca

SEQ ID NO: 464 - DNA, 51 bp, Homo sapiens
tgcctgccatttccgctctctggatrgactaaatagggctggcttggaaac

SEQ ID NO: 465 - DNA, 51 bp, Homo sapiens
cgataaagtctctgctgccatggaayatatcaggaaggaaataggaattaa

SEQ ID NO: 466 - DNA, 51 bp, Homo sapiens
tcaagggacctgtagtctagatacasaaataaagattaacacatgaaacaa

SEQ ID NO: 467 - DNA, 51 bp, Homo sapiens
ggtgcagtggcttccctgtgtggtcygtgagagccctgggccctctgcagg

SEQ ID NO: 468 - DNA, 51 bp, Homo sapiens; identical to SEQ ID NO: 30

SEQ ID NO: 469 - DNA, 51 bp, Homo sapiens; identical to SEQ ID NO: 171

SEQ ID NO: 470 - DNA, 51 bp, Homo sapiens
cctagaatgtggtaatgggaatgtcygttgaatgaaacaaaatgagctaaa

SEQ ID NO: 471 - DNA, 51 bp, Homo sapiens
gtgttaacgacatgaccagacctttygccaggccacactcaatcaggggtt

SEQ ID NO: 472 - DNA, 51 bp, Homo sapiens
atgaagtcagtctccaaaggtcaccygcaatccatgttaggaaccaggttt

SEQ ID NO: 473 - DNA, 51 bp, Homo sapiens
ttaagccaagtagttgagtacaaacmaggacaggcgtttaatgatacagat

SEQ ID NO: 474 - DNA, 51 bp, Homo sapiens
aacacagatgtcaggacgggctcagsaacacaggtcccaggtgtccggggt

SEQ ID NO: 475 - DNA, 51 bp, Homo sapiens
actcagggcatcatcttgttttagaygcacgtgttaacacctcagttctgt

SEQ ID NO: 476 - DNA, 51 bp, Homo sapiens
agaattcctgggaatgcaggcattayggtgcagtagaggaaacagaccaat

SEQ ID NO: 477 - DNA, 51 bp, Homo sapiens
cattgaactgagatgttcctatgtartgcctatctttatgctgtaaatcat

SEQ ID NO: 478 - DNA, 51 bp, Homo sapiens
ttaatataatactgtcatgtcaatargaaatttttagtacattttaaattt

SEQ ID NO: 479 - DNA, 51 bp, Homo sapiens; identical to SEQ ID NO: 131

SEQ ID NO: 480 - DNA, 51 bp, Homo sapiens
ttgtcaccaaccaatgctgtcgatcrcttgcttccctttaacaccttcatg

SEQ ID NO: 481 - DNA, 51 bp, Homo sapiens
aagtggaaataggaggacctatgttyttctgtgagttctctcattgttttc

SEQ ID NO: 482 - DNA, 51 bp, Homo sapiens
ctgggagaggcgatggtgccatcacracacacctcaggaggccatggtcag

SEQ ID NO: 483 - DNA, 51 bp, Homo sapiens
ttcaacttgtgcacacttctcccacrgcacctctcatgatgtagacatatc

SEQ ID NO: 484 - DNA, 51 bp, Homo sapiens
tccattctgtgttactcagcaacgaycttatttgcttgcaagcattgtggt

SEQ ID NO: 485 - DNA, 51 bp, Homo sapiens
ttgagagctcttcaaaatctttgaamtgctaatggcatactctctgatgct

SEQ ID NO: 486 - DNA, 51 bp, Homo sapiens
gttaataatttcttatgctataaagscctctttctaaatgtaaatacatgc

SEQ ID NO: 487 - DNA, 51 bp, Homo sapiens
gggaatgcactgctgattgacacatygaaactcgctctctgtgcactcccg

SEQ ID NO: 488 - DNA, 51 bp, Homo sapiens
tactttgccacagtttaaaccttttrgatgaagttattgtgctttaaagaa

SEQ ID NO: 489 - DNA, 51 bp, Homo sapiens
gaaagaacccacggttactgacgggmtttagccattacagtgacactcaaa

SEQ ID NO: 490 - DNA, 51 bp, Homo sapiens
cactgtggcttacaatgagccatgaygcaaagacgaatcatggacagtttc

SEQ ID NO: 491 - DNA, 51 bp, Homo sapiens
tcaccatacatttgagcctgaggggwtttggcaaaagattcccagaaaatc

SEQ ID NO: 492 - DNA, 51 bp, Homo sapiens
atgcttctagtttggaattaggcacrgagatcttcttttaacggagataag

SEQ ID NO: 493 - DNA, 51 bp, Homo sapiens
taataataaaataacaatctctgtcrtttttgctagccattagcaaactac

SEQ ID NO: 494 - DNA, 51 bp, Homo sapiens; identical to SEQ ID NO: 102

SEQ ID NO: 495 - DNA, 51 bp, Homo sapiens; identical to SEQ ID NO: 248

SEQ ID NO: 496 - DNA, 51 bp, Homo sapiens
gggcatttttcccatcgctgtccttyggcgtggaaatctcagtgggtacta

SEQ ID NO: 497 - DNA, 51 bp, Homo sapiens
gagaggggtttttgcaataacattarcaaaccataaatatctgccggccgc

SEQ ID NO: 498 - DNA, 51 bp, Homo sapiens
tgacaggtgacatctcttgaaatagwgcacacgtaaaatccatcaggatac

SEQ ID NO: 499 - DNA, 51 bp, Homo sapiens
cacagacctagcctgaactggaacgygaccgaagctcagaatgaattcccc

SEQ ID NO: 500 - DNA, 51 bp, Homo sapiens
ggaagaacattcagaattcaagcacraaccttccaactctaaaattccatg

SEQ ID NO: 501 - DNA, 51 bp, Homo sapiens
atcagaaagtcttgaaaatgaagttkgagaaaggagaaaatactccagata

SEQ ID NO: 502 - DNA, 51 bp, Homo sapiens
gcttgttatggagttgaagctctgaytgaaagtgaattttgtcacttaagg

SEQ ID NO: 503 - DNA, 51 bp, Homo sapiens
aatcaatcttgcttagagacgtaatyaatagacgagccacaagaaaaggga

SEQ ID NO: 504 - DNA, 51 bp, Homo sapiens
atttcagaaggggtcctgcctgatgsctgggaagaagaaatgctgcgccga

SEQ ID NO: 505 - DNA, 51 bp, Homo sapiens
cttcctgagtgcctgctctgtgatgmactgtgcgaggtgctgctctggggc

SEQ ID NO: 506 - DNA, 51 bp, Homo sapiens
cacggagctgactcatccaaccctcygctgtcaggtttaaaacaaatataa

SEQ ID NO: 507 - DNA, 51 bp, Homo sapiens
gcagttcactaattcatttgaaaagwgcttggatggtttaagcctatggtt

SEQ ID NO: 508 - DNA, 51 bp, Homo sapiens
cattgtacccatttatatccacaccyctgaaagatgcacctgaatcatttg

SEQ ID NO: 509 - DNA, 51 bp, Homo sapiens
gaaaggaaggagttaaagtaacagcraagtgtggagcctgatggattgaaa

SEQ ID NO: 510 - DNA, 51 bp, Homo sapiens
agggagaccggctgcctgggtccctyctggctgcctcaccatcaggggcgg

SEQ ID NO: 511 - DNA, 51 bp, Homo sapiens
agagggaaccaccagatgagttcacrttccagtgggaattggagagtgtct

SEQ ID NO: 512 - DNA, 51 bp, Homo sapiens
ctaagcagttactgattatgtctgaygtaaatgcaagtcaggcacgtaata

SEQ ID NO: 513 - DNA, 51 bp, Homo sapiens
ccaagtcgtttctatgtggttgaggrtaaaattcagtaaggttgaacctct

SEQ ID NO: 514 - DNA, 51 bp, Homo sapiens
tagattccatggtaccatgttgagarttgtgcctagctactgagagtcttt

SEQ ID NO: 515 - DNA, 51 bp, Homo sapiens
caccttggtgagcagctgactgaggmacacgagggcaggggtcaccactgg

SEQ ID NO: 516 - DNA, 51 bp, Homo sapiens
gcctatttcatccgttcagggaggcygattcacaggagtccatccagatga

SEQ ID NO: 517 - DNA, 51 bp, Homo sapiens
ctgttaaggaaacgtattatgcccartgttctgttcagagaagcagttaat

SEQ ID NO: 518 - DNA, 51 bp, Homo sapiens
aatagaaatcatccttaaaatgttastgttgcaatttcgaactgaagtaca

SEQ ID NO: 519 - DNA, 51 bp, Homo sapiens
gacaagagatagttttgtcatcattkacggaatccttacttcagggaatta

SEQ ID NO: 520 - DNA, 51 bp, Homo sapiens
tctttcctcattgtctgcgatctggmaatagagctttcagttctcatcact

SEQ ID NO: 521 - DNA, 51 bp, Homo sapiens; identical to SEQ ID NO: 121

SEQ ID NO: 522 - DNA, 51 bp, Homo sapiens
gccacggtggatgcctgagtcttacrcatgagcaatggagacctaacagac

SEQ ID NO: 523 - DNA, 51 bp, Homo sapiens; identical to SEQ ID NO: 141

SEQ ID NO: 524 - DNA, 51 bp, Homo sapiens
tgggatatcctctgaaatgtttcaaraaatgtgaataaattagttttggct

SEQ ID NO: 525 - DNA, 51 bp, Homo sapiens
ccagcctgattcccgagaagggagcstgcttgcgaaggaactggcactcgg

SEQ ID NO: 526 - DNA, 51 bp, Homo sapiens
aggttttgagcctgcttttgttaggrttggttgagaagctagcaagtttct

SEQ ID NO: 527 - DNA, 51 bp, Homo sapiens
ttttcagtgactagtgttaatttcayattaaaagcggctctaatgttagcc

SEQ ID NO: 528 - DNA, 51 bp, Homo sapiens; identical to SEQ ID NO: 258

SEQ ID NO: 529 - DNA, 51 bp, Homo sapiens
tataatcagagtagtttggagattgyttgaccactgtgggtgtcggcacaa

SEQ ID NO: 530 - DNA, 51 bp, Homo sapiens
aaaatgtaaatagtattttgttattrtgctttggtaacataaaatatatgg

SEQ ID NO: 531 - DNA, 51 bp, Homo sapiens
tacagggagtccgcattccatcaccrcgtggagctgccctgccatgaacca

SEQ ID NO: 532 - DNA, 51 bp, Homo sapiens; identical to SEQ ID NO: 61

SEQ ID NO: 533 - DNA, 51 bp, Homo sapiens
aaatgtgtttgatctagatctcttascagtttaatcctgcattcataacca

SEQ ID NO: 534 - DNA, 51 bp, Homo sapiens
ccactagggttatgtttgcttttttycattatttaaagaaaaaggcaggat

SEQ ID NO: 535 - DNA, 51 bp, Homo sapiens
ctcattcatttaacagacgttttcastcaacacctactaggaaccaggaac

SEQ ID NO: 536 - DNA, 51 bp, Homo sapiens
acacagcaccagaaattttgttgaartcttaatattctgcaggaaactgac

SEQ ID NO: 537 - DNA, 51 bp, Homo sapiens
tgatgactttgggttgtgtttctcartatctttactatgactgctgttggt

SEQ ID NO: 538 - DNA, 51 bp, Homo sapiens
aaaaccccggatagctaagaaaattwcaacagagcttactgttgctacttt

SEQ ID NO: 539 - DNA, 51 bp, Homo sapiens
ctccagttccataccttgcctttgcratcatggtgtattagtcagcttggg

SEQ ID NO: 540 - DNA, 51 bp, Homo sapiens; identical to SEQ ID NO: 198

SEQ ID NO: 541 - DNA, 51 bp, Homo sapiens; identical to SEQ ID NO: 440

SEQ ID NO: 542 - DNA, 51 bp, Homo sapiens; identical to SEQ ID NO: 224

SEQ ID NO: 543 - DNA, 51 bp, Homo sapiens
cttcaacacaaatggactataactcwtacatgttaaatttgccaaacctct

SEQ ID NO: 544 - DNA, 51 bp, Homo sapiens
ttccatttataaaagcagtcaaggckccaagaaagtgagacttcagcactt

SEQ ID NO: 545 - DNA, 51 bp, Homo sapiens
acatgtcttctttttatgggcaagartgtctccagttcacttgggtttttc

SEQ ID NO: 546 - DNA, 51 bp, Homo sapiens
gtgcaaggtgcaacagctgctgacawatgtgactgtgagctgatgttgaaa

SEQ ID NO: 547 - DNA, 51 bp, Homo sapiens
atcatctaaactcttttactctcagrttttctgtataattggtaggtgctc

SEQ ID NO: 548 - DNA, 51 bp, Homo sapiens
tgtcattctacatactttcttctacrcccatgcttacaactttcacctgag

SEQ ID NO: 549 - DNA, 51 bp, Homo sapiens; identical to SEQ ID NO: 32

SEQ ID NO: 550 - DNA, 51 bp, Homo sapiens
aacatcaaaaaacaactttcctaaaygctggcttacaaggatgctacatat

SEQ ID NO: 551 - DNA, 51 bp, Homo sapiens
agaattaacatttgtattgcagacayaggagtccaggaaaggtcccacaga

SEQ ID NO: 552 - DNA, 51 bp, Homo sapiens
tttgatcctgaagatgtttgcccacwccctccttgtattttgttctctgaa

SEQ ID NO: 553 - DNA, 51 bp, Homo sapiens
tagcagaaaaacaattgtattcagaycagcccagctaaagtactccagttc

SEQ ID NO: 554 - DNA, 51 bp, Homo sapiens
ttgccttgtgtttcagttagtccccrttcaaaactaatgtttctcatctgt

SEQ ID NO: 555 - DNA, 51 bp, Homo sapiens
cattccacacaatcataaagaaggarcatcacagcaatctctttgaattcc

SEQ ID NO: 556 - DNA, 51 bp, Homo sapiens
tcatggtggctaacgaatgagtaccraaatataaaggctcactctagagtg

SEQ ID NO: 557 - DNA, 51 bp, Homo sapiens
ttaaacaatcatgccataaatgtatrcatccaatggaggtcagtattatac

SEQ ID NO: 558 - DNA, 51 bp, Homo sapiens
ctccttgaaagagtgttagcctttaygagcaaaagtcaaagcagtactgga

SEQ ID NO: 559 - DNA, 51 bp, Homo sapiens
ctaaatttcaaaagatgaatgtgctytcagtatttctttcctatgtttcaa

SEQ ID NO: 560 - DNA, 51 bp, Homo sapiens
aaaatgaaactacacctaatatctaygaagccaattgtacgtagtaaagat

SEQ ID NO: 561 - DNA, 51 bp, Homo sapiens
gagagagttaatggtggatctttgaraacaagtgaccatgggaaattaagg

SEQ ID NO: 562 - DNA, 51 bp, Homo sapiens
taagctggctggtaaagcctccacgsgacaacagtttcactttgcttcggg

SEQ ID NO: 563 - DNA, 51 bp, Homo sapiens
ctgagccttcttggtcactctcttgstcttcagcatcacataggagatgaa

SEQ ID NO: 564 - DNA, 51 bp, Homo sapiens
caaagataatgtttacagttgacagrtcaggccaggtgcagtgtttcacac

SEQ ID NO: 565 - DNA, 51 bp, Homo sapiens
cccatcttgctgcagtagaatgacgyggcctgaatcacagggttgcagcag

SEQ ID NO: 566 - DNA, 51 bp, Homo sapiens
cagagttaaaagccagctagtaagcracggagctgagattcaaatacacgg

SEQ ID NO: 567 - DNA, 51 bp, Homo sapiens
tttgttcatttcttgctatgcgccaygcacttaacgcctgttatcacattt

SEQ ID NO: 568 - DNA, 51 bp, Homo sapiens; identical to SEQ ID NO: 323

SEQ ID NO: 569 - DNA, 51 bp, Homo sapiens
ggtaaggagggttctgagaaacaaaygacgacccctttctttaagtccctc

SEQ ID NO: 570 - DNA, 51 bp, Homo sapiens
ggttattcaaatctgaaaactaggcwttgttctccattattaaaacccttt

SEQ ID NO: 571 - DNA, 51 bp, Homo sapiens
gctgcttgaggtagtggagttcaccrtgctcttggttcttgtctggctttt

SEQ ID NO: 572 - DNA, 51 bp, Homo sapiens
aactaattagatataaccatccttgytattttaaaattatatcttcaatat

SEQ ID NO: 573 - DNA, 51 bp, Homo sapiens
gccgtgtttagactctgattgtgggyggcggtgagtctgtgggcttattag

SEQ ID NO: 574 - DNA, 51 bp, Homo sapiens
tatggtgaagcagcggagaatccagytaagcaaaggatagaatactggtaa

SEQ ID NO: 575 - DNA, 51 bp, Homo sapiens
atagtaggtaaactaagctattgttkgtctaacctacctcctaaagagctc

SEQ ID NO: 576 - DNA, 51 bp, Homo sapiens; identical to SEQ ID NO: 341

SEQ ID NO: 577 - DNA, 51 bp, Homo sapiens
agcatgctcaggcctgtaatacaggyggagaacaacaccgtggtgacaaat

SEQ ID NO: 578 - DNA, 51 bp, Homo sapiens
agagtggggattcagacacatttttsgcagcctgaggaatgggaacttgtg

SEQ ID NO: 579 - DNA, 51 bp, Homo sapiens
gctgcagcctctggggataagcagtrtatgcagaaactttgatagtcaatt

SEQ ID NO: 580 - DNA, 51 bp, Homo sapiens
tgcactctgcttacttgtaagtatgrggcacaaccacacaggatgcagaaa

SEQ ID NO: 581 - DNA, 51 bp, Homo sapiens
aattttctttccgatatgatccaaayaatgtgcaataaagagtcccagtga

SEQ ID NO: 582 - DNA, 51 bp, Homo sapiens
tcgcatggtactcccacccatcaaarcaaaccccagactctggatcctttt

SEQ ID NO: 583 - DNA, 51 bp, Homo sapiens
agaaaaccatgtaatttttcagcttratttaacattgtatctagggcaagc

SEQ ID NO: 584 - DNA, 51 bp, Homo sapiens
tctgccatgaatattctgcaggccaytccttcaaagggtaccttcagggtt

SEQ ID NO: 585 - DNA, 51 bp, Homo sapiens
actgttcccaccaccttaacatgtcrcaggggcctagcaaatgctaattga

SEQ ID NO: 586 - DNA, 51 bp, Homo sapiens
ccttttcttccttctggattcagtgwccttcataaagtacatcctttagaa

SEQ ID NO: 587 - DNA, 51 bp, Homo sapiens
tttacttgtttctctgagcatgatcrccctcataatggaatgactaagggc

SEQ ID NO: 588 - DNA, 51 bp, Homo sapiens
acatatcaaagtgcataagcaaaagsatagtttcagctttataaccaattg

SEQ ID NO: 589 - DNA, 51 bp, Homo sapiens
tctgtacaaagtgtatcatgggaccrtcctataaggttaagctttctcatt

SEQ ID NO: 590 - DNA, 51 bp, Homo sapiens
tgataaatttgactgtagcatggagrgataattctctgatcagaatcccac

SEQ ID NO: 591 - DNA, 51 bp, Homo sapiens; identical to SEQ ID NO: 431

SEQ ID NO: 592 - DNA, 51 bp, Homo sapiens
atgttcacttcacatatgttaattcrtttgctccttaaaacaactctaaga

SEQ ID NO: 593 - DNA, 51 bp, Homo sapiens
gagacatggaataagccaatgcctasactgtctgtggcttgaacgagatat

SEQ ID NO: 594 - DNA, 51 bp, Homo sapiens
aaacaggctagaggaaaatataaatraaggccaatagtgttaggatcagat

SEQ ID NO: 595 - DNA, 51 bp, Homo sapiens
cagagcacaaacagaggcgtgcagcraagtaaacacgggaagctctgaaaa

SEQ ID NO: 596 - DNA, 51 bp, Homo sapiens
atgtggtataaggcatgaataaccaytgacagtttagccataaatctttgc

SEQ ID NO: 597 - DNA, 51 bp, Homo sapiens
tatttctagccctatattgtcacttmccctgctctcatgcaaatgattcct

SEQ ID NO: 598 - DNA, 51 bp, Homo sapiens
cattttacaagttaggacatagcttkggtaaatgactgtgtacgctgagtt

SEQ ID NO: 599 - DNA, 51 bp, Homo sapiens
cctcgtttataataaggctttcctgkaaaagtagctgtttcttgaaatccc

SEQ ID NO: 600 - DNA, 51 bp, Homo sapiens
gcacagaaaaatggacaaatacttcrcaaggatgtcaggagtccaaaaatg

SEQ ID NO: 601 - DNA, 51 bp, Homo sapiens
gccggccagtggatggtatggaagcygcttaggttgagtatgtctcaaagc

SEQ ID NO: 602 - DNA, 51 bp, Homo sapiens
tttcaagagattcatagatggatcargaaaatctagcactggataaagtag

SEQ ID NO: 603 - DNA, 51 bp, Homo sapiens
actggtacttctggctgtgctaagtrtggtaggcaagtctttgtatgctca

SEQ ID NO: 604 - DNA, 51 bp, Homo sapiens
atggagaattgacaagaaatacaacrttagtataaacttcacccaattcaa

SEQ ID NO: 605 - DNA, 51 bp, Homo sapiens
gaacacataccaaggttagtgggttygatcatttgaaaaatggcagcacca

SEQ ID NO: 606 - DNA, 51 bp, Homo sapiens
ccagtgtttctcattttcccgtgctsgaagctttggcaggtgtcaagatat

SEQ ID NO: 607 - DNA, 51 bp, Homo sapiens
cttcaacacctctctaaattattacmttagtctaaattacggggccagcat

SEQ ID NO: 608 - DNA, 51 bp, Homo sapiens
cccagaggctcagagactcagacccytgagactaagggggttaaaaacgca

SEQ ID NO: 609 - DNA, 51 bp, Homo sapiens
atttggctgcagagtccactgagctrcacaggcaccctgcagagggatggg

SEQ ID NO: 610 - DNA, 51 bp, Homo sapiens; identical to SEQ ID NO: 379

SEQ ID NO: 611 - DNA, 51 bp, Homo sapiens
ctggaaaaacaggtttccttcatgarcttctaaaagcaaaatgaggaagaa

SEQ ID NO: 612 - DNA, 51 bp, Homo sapiens
tctccattcatccaggcagactcgaktttaggttcctttccccagtcagtc

SEQ ID NO: 613 - DNA, 51 bp, Homo sapiens
gctccagtttctcttaagctgcccartttcacagagtacaaaatagttgta

SEQ ID NO: 614 - DNA, 51 bp, Homo sapiens
gaactcctactatgcgttggttactygccgggcactgggaaacaaagatga

SEQ ID NO: 615 - DNA, 51 bp, Homo sapiens
cctgcaaagctgaaacctaattcacyttctctaggtccctaagcagactgt

SEQ ID NO: 616 - DNA, 51 bp, Homo sapiens
ggaatatcaaccaatcaaagacacaraggtttatcaaggaaggtttatgga

SEQ ID NO: 617 - DNA, 51 bp, Homo sapiens
ggacagctactttcccatgctgaaargtcgggcagaacgagaacaggcctt

SEQ ID NO: 618 - DNA, 51 bp, Homo sapiens
cctttttccaacataaatagttcttkctcgctcattgtcccaccctgcctc

SEQ ID NO: 619 - DNA, 51 bp, Homo sapiens
ttatctccatgataatgactcatgayagcacaaagatcaaaaagaagaaaa

SEQ ID NO: 620 - DNA, 51 bp, Homo sapiens
tcacagctgttatttcgtgatcttcrccacacttcaaagtaataggtagtt

SEQ ID NO: 621 - DNA, 51 bp, Homo sapiens
aactattgaaatatcagtccttcttrggtgaccttgagtgccagcttggtt

SEQ ID NO: 622 - DNA, 51 bp, Homo sapiens
ggtttatttgagggtaagagtaaackggaggaaagagttgccacagcaggg

SEQ ID NO: 623 - DNA, 51 bp, Homo sapiens
tggcttcctagcctcaaatctggcawataaataaggttagccttcctgaga

SEQ ID NO: 624 - DNA, 51 bp, Homo sapiens
ataataacagtgattagttctgtatygtgggtaattaaaaatcaaagcaaa

SEQ ID NO: 625 - DNA, 51 bp, Homo sapiens
gcctcttttggagggacttagaaagraggccagctgtttcaaagactcagc

SEQ ID NO: 626 - DNA, 51 bp, Homo sapiens
ctcagcagccctctcaggaacccagrgctatgcagcccacagcattcgaga

SEQ ID NO: 627 - DNA, 51 bp, Homo sapiens
aaaagttccatacagtagtttgttarttgaactccttgagaattgcccaaa

SEQ ID NO: 628 - DNA, 51 bp, Homo sapiens
atatgcaatatgtgtatgaatactcrgtttaaaaatgtatgttcctcaatt

SEQ ID NO: 629 - DNA, 51 bp, Homo sapiens
cactttgagcagccaaatgcgacggygcagggatttcaaggggcctttgcg

SEQ ID NO: 630 - DNA, 51 bp, Homo sapiens
gagtatccacaccctggcatctctgsccgggagcgttcaggctccatggac

SEQ ID NO: 631 - DNA, 51 bp, Homo sapiens
ttgcaggtagcatgcatcttgtcagrgtgatatggtttggctatgtcccca

SEQ ID NO: 632 - DNA, 51 bp, Homo sapiens
ttgtgaactccctgaccttaggggcrttgtctttttttgctctttatattt

SEQ ID NO: 633 - DNA, 51 bp, Homo sapiens
ctgaccctgtctcttggttcctcttyactaaggtaagtagataccacctcg

SEQ ID NO: 634 - DNA, 51 bp, Homo sapiens
atattccgatttcccttctttttaayatgtatacccagtagtgggattgct

SEQ ID NO: 635 - DNA, 51 bp, Homo sapiens
ggatgtccctaaatcacgttgtaacygagcagacattcacagggaaaactt

SEQ ID NO: 636 - DNA, 51 bp, Homo sapiens
tgctgctggagagctgatctgatgcrgtatataggctgagtggtgagagat

SEQ ID NO: 637 - DNA, 51 bp, Homo sapiens
ggtgacttaactctggaccaaatgtrtgctttttgttttatccactgtgga

SEQ ID NO: 638 - DNA, 51 bp, Homo sapiens
ggaccaagtgctccagattatttcarcaactcattgggatgtagctctgga

SEQ ID NO: 639 - DNA, 51 bp, Homo sapiens
tgatttcactgtggccactgaaactwaatgacacaaatacagatctttaat

SEQ ID NO: 640 - DNA, 51 bp, Homo sapiens
ctgtggcagactttaaaatcgtttcmtgtgacattagacaggtgcttcatc

SEQ ID NO: 641 - DNA, 51 bp, Homo sapiens
gcctgccttaagttctgctaaaggcmatgttgttattaaggacgggtgagg

SEQ ID NO: 642 - DNA, 51 bp, Homo sapiens
tctactctctagtctctagtcaaggygaattattcaatttaataaattagg

SEQ ID NO: 643 - DNA, 51 bp, Homo sapiens
tcacactgactagggttagaggtcamtgggtaaagcatagtatggaggttg

SEQ ID NO: 644 - DNA, 51 bp, Homo sapiens
tatcgaagagttccccgtgccggctyttcaccatcccgttttccagcaagg

SEQ ID NO: 645 - DNA, 51 bp, Homo sapiens
cctgtaaaaattgcacaaaattggcrgtatcatgattccatcttctacaga

SEQ ID NO: 646 - DNA, 51 bp, Homo sapiens
aattcacagaagtaatcagaccaaastgatggtggttgagaaccaactgtg

SEQ ID NO: 647 - DNA, 51 bp, Homo sapiens
atgaaggaggtgctcctctggacatrgttgccctgggcactccccatctgc

SEQ ID NO: 648 - DNA, 51 bp, Homo sapiens
ttaaacaagattatgcatgaggaaaygtttagaaacatgtaaagacctacg

SEQ ID NO: 649 - DNA, 51 bp, Homo sapiens
aaagcctgagactatcttatctcatyatcaaagagtgaagaacaatcccaa

SEQ ID NO: 650 - DNA, 51 bp, Homo sapiens
gcacccatgtagtctcctagtgtcakgaccaccttctgtatctgctgagcc

SEQ ID NO: 651 - DNA, 51 bp, Homo sapiens
tttgcacatagttggcgttcaataartgaatgaattgatatttgggccttt

SEQ ID NO: 652 - DNA, 51 bp, Homo sapiens
taaagggaaaaaaagggctccttttygtgtacgttttttcattgctgttca

SEQ ID NO: 653 - DNA, 51 bp, Homo sapiens
acgtgctaacaatttttagtggatargctcatatgcaatattatggcatga

SEQ ID NO: 654 - DNA, 51 bp, Homo sapiens
tgccgtgaggaaaggtaagagatgarttgtgaaccattagtggtagtgaag

SEQ ID NO: 655 - DNA, 51 bp, Homo sapiens
tcatccaaaagggcttgtttatatgyttcagataataatcatttctgagca

SEQ ID NO: 656 - DNA, 51 bp, Homo sapiens; identical to SEQ ID NO: 257

SEQ ID NO: 657 - DNA, 51 bp, Homo sapiens
tttgaagcttggcaactgcagaagakcagggaataggtaagtggccaggta

SEQ ID NO: 658 - DNA, 51 bp, Homo sapiens
atatgatatatgatatgacatatgayatgatacgatattgcacaaagccaa

SEQ ID NO: 659 - DNA, 51 bp, Homo sapiens; identical to SEQ ID NO: 310

SEQ ID NO: 660 - DNA, 51 bp, Homo sapiens
ccacattgacaatgttaaggacaagygagagagaaggcagattcaattact

SEQ ID NO: 661 - DNA, 51 bp, Homo sapiens
tgtgacgttttgtctactagaatctrattgaaaagtgctactgttcctcat

SEQ ID NO: 662 - DNA, 51 bp, Homo sapiens
tcaagcttttcttcatggttataaamgaatattgtgatgagtgatttatct

SEQ ID NO: 663 - DNA, 51 bp, Homo sapiens
gtctagagtacagagatcctgagagrgagaaaaaaggcacctggtcctaag

SEQ ID NO: 664 - DNA, 51 bp, Homo sapiens; identical to SEQ ID NO: 400

SEQ ID NO: 665 - DNA, 51 bp, Homo sapiens
acaattcaacccttaacagtcactcrgcaaactgtgagaatggagaaggca

SEQ ID NO: 666 - DNA, 51 bp, Homo sapiens
catgtaccagatacttgttcaaaagrttcctcacttttaactcaattcccc

SEQ ID NO: 667 - DNA, 51 bp, Homo sapiens
ccaatttacttgaaccatttaatatytagcttacaagaaaagttccagctt

SEQ ID NO: 668 - DNA, 51 bp, Homo sapiens
gtgtaattctgtataagatctctctytagactcagaactggatgtaaatat

SEQ ID NO: 669 - DNA, 51 bp, Homo sapiens
atggataagcaaatgcgatatatacmtacaataaaatgttattcagccttg

SEQ ID NO: 670 - DNA, 51 bp, Homo sapiens
aaaatgtaaattctggaaaagcaagwtcaatcaacattcaaattatattca

SEQ ID NO: 671 - DNA, 51 bp, Homo sapiens
gatagcatctgacataccatgtgccrggatgagaaatacctctgtaaatga

SEQ ID NO: 672 - DNA, 51 bp, Homo sapiens; identical to SEQ ID NO: 476

SEQ ID NO: 673 - DNA, 51 bp, Homo sapiens
cgtagctctgactttcatttcaagtygggaaccttcctttatattgacatt

SEQ ID NO: 674 - DNA, 51 bp, Homo sapiens
aatactttgcactgtgcgtaaacacmtgtactctcctaaggggacactgta

SEQ ID NO: 675 - DNA, 51 bp, Homo sapiens
gcctcccaagggaaaactttaaccartgaaggacaaaaataaacagataaa

SEQ ID NO: 676 - DNA, 51 bp, Homo sapiens; identical to SEQ ID NO: 79

SEQ ID NO: 677 - DNA, 51 bp, Homo sapiens
atatctattaatctaaaaattatttwaaaactgctttatggtatcttttat

SEQ ID NO: 678 - DNA, 51 bp, Homo sapiens
gtacacatgaatagaaagcaccacargtaataaaaacacctaaaaaggtca

SEQ ID NO: 679 - DNA, 51 bp, Homo sapiens
cttctctgctgctcctagctccaggscctgcaggcatgtctgcagctcctt

SEQ ID NO: 680 - DNA, 51 bp, Homo sapiens
aattttctttacgccatactcctgayatagaatagtctaactggtatccac

SEQ ID NO: 681 - DNA, 51 bp, Homo sapiens
atctttttctagaataccttgtaagsatattgagagcttttcctgccaagt

SEQ ID NO: 682 - DNA, 51 bp, Homo sapiens
agatagggaatatgttgtcagtaatrtcactatcattatgaaagtgatatc

SEQ ID NO: 683 - DNA, 51 bp, Homo sapiens; identical to SEQ ID NO: 398

SEQ ID NO: 684 - DNA, 51 bp, Homo sapiens
ttggtctcttataccatgaaaataasttacagataaattaaatctctaaat

SEQ ID NO: 685 - DNA, 51 bp, Homo sapiens
gggaagaaagtcatctatttcaactrcctgagtgagctccacgaacacctt

SEQ ID NO: 686 - DNA, 51 bp, Homo sapiens; identical to SEQ ID NO: 334

SEQ ID NO: 687 - DNA, 51 bp, Homo sapiens
atataagttatacttcaagggataawttgtcataattccatgcattatcaa

SEQ ID NO: 688 - DNA, 51 bp, Homo sapiens
cattaccagcaccaccaggaatatcygcctcttcccggacgagtccaagag

SEQ ID NO: 689 - DNA, 51 bp, Homo sapiens
atactaaataaaatatctttaagcartttagcaagtagcatctttgaaaat

SEQ ID NO: 690 - DNA, 51 bp, Homo sapiens
taaaaggctgcagtagacacatgagygccaagagaggagcaagaaacccaa

SEQ ID NO: 691 - DNA, 51 bp, Homo sapiens
gttgaagttagccaggcaaatagggrtaacagcattcttgatagagcagat

SEQ ID NO: 692 - DNA, 51 bp, Homo sapiens
caaagatgaattatgtaagaatacascctgggtacaaggcaggtcattttc

SEQ ID NO: 693 - DNA, 51 bp, Homo sapiens
ttagtcttaggaggttgggtctgacrctatggttactgctggttagtctca

SEQ ID NO: 694 - DNA, 51 bp, Homo sapiens
attcctgtctctctgcccattcagcrttgtgctcagaagggcatcctccac

SEQ ID NO: 695 - DNA, 51 bp, Homo sapiens
taattattacttaagatacaacattstgattactgaggtttgcctcaaagc

SEQ ID NO: 696 - DNA, 51 bp, Homo sapiens
gtgagacgctgactttagaaatagcyggtgattacagatttaattcatgtt

SEQ ID NO: 697 - DNA, 51 bp, Homo sapiens
tggtaggtactcaggaagtcattgcygagtgttcagtgcatgcttgttgaa

SEQ ID NO: 698 - DNA, 51 bp, Homo sapiens
taattgtgctccctgtctcagaaatrcctccctgtgagtgaaccacttaag

SEQ ID NO: 699 - DNA, 51 bp, Homo sapiens
aaggaacacattgttttggggtccaratgagaagataaggtgaaactgtat

SEQ ID NO: 700 - DNA, 51 bp, Homo sapiens
accaaaagaaactggtattaaatgtrtcaaagtcttaaaatgtgaaacaca

SEQ ID NO: 701 - DNA, 51 bp, Homo sapiens
aaacattctctcccattcaaatcagygggcacagtttgcactttaaaaaaa

SEQ ID NO: 702 - DNA, 51 bp, Homo sapiens
ttgtttcctttagataacatcctgcyggttactgatcatacctgttgatga

SEQ ID NO: 703 - DNA, 51 bp, Homo sapiens
aaggaggagacacaactcttcgtccrcaggagtcttcctgtttttgttgtt

SEQ ID NO: 704 - DNA, 51 bp, Homo sapiens
ttttacaggtaagaaatatatgtcamtcaaatgtgtgtgacaggttaagta

SEQ ID NO: 705 - DNA, 51 bp, Homo sapiens
ggggagatgcatctgcagagcaagcmcaagtctgactggctgtcaccaggt

SEQ ID NO: 706 - DNA, 51 bp, Homo sapiens
aagcatgttaacttagcggtttacartattacttttcattggtagaattag

SEQ ID NO: 707 - DNA, 51 bp, Homo sapiens
ataaataaataataattcaaggtggyctcaaagaatccctgcaatttaggg

SEQ ID NO: 708 - DNA, 51 bp, Homo sapiens
gttgttgcttcctccccttggaatgycctaatcgccatgaccaaaagtgat

SEQ ID NO: 709 - DNA, 51 bp, Homo sapiens
cattatctcagttgcgcctgtatgayagaatgtcttataatgtcacagtgt

SEQ ID NO: 710 - DNA, 51 bp, Homo sapiens
attttgtctggtgaagtggaacaacygtctgaataatgttggactatcata

SEQ ID NO: 711 - DNA, 51 bp, Homo sapiens
cattgtttaattacttgtaggacaamatataatcagttgagactcccagaa

SEQ ID NO: 712 - DNA, 51 bp, Homo sapiens
agtctttttctacctgttgtgtaaargaagctaaaaaaagaaacccacaaa

SEQ ID NO: 713 - DNA, 51 bp, Homo sapiens
ctgctccaatgctgcccctcattctytgagttaccattgaccactccttgg

SEQ ID NO: 714 - DNA, 51 bp, Homo sapiens
attttaaatatcaaccagtgaatgakgatagtgctgaccagaactaccagt

SEQ ID NO: 715 - DNA, 51 bp, Homo sapiens
tcattctacggattgaaaataagacmtgtgaagctgtggccaacagcaaaa

SEQ ID NO: 716 - DNA, 51 bp, Homo sapiens
ttctgggcccaactacagtacagacrttgatgagaccaactctgactttgg

SEQ ID NO: 717 - DNA, 51 bp, Homo sapiens; identical to SEQ ID NO: 377

SEQ ID NO: 718 - DNA, 51 bp, Homo sapiens; identical to SEQ ID NO: 387

SEQ ID NO: 719 - DNA, 51 bp, Homo sapiens
tccagagaaggttgtaacccctcgtyctttttacacaccagggctacaggc

SEQ ID NO: 720 - DNA, 51 bp, Homo sapiens
caaataagcaatgttgttttaagccsttgtcattgttaaagctgctttagc

SEQ ID NO: 721 - DNA, 51 bp, Homo sapiens
tttcagaaacctaggtccaaaagtcstgctaggtatctggtatctgggatt

SEQ ID NO: 722 - DNA, 51 bp, Homo sapiens
agtccatgttgtcaattcagaccacrcttagggaatcagactctccaggga

SEQ ID NO: 723 - DNA, 51 bp, Homo sapiens
tttctaccaaaatcttaattggcatrtaaaaaaggggattcaaaaatttct

SEQ ID NO: 724 - DNA, 51 bp, Homo sapiens
atttgactaattttcaatttttcacyttagagacaagaaatgtccattatg

SEQ ID NO: 725 - DNA, 51 bp, Homo sapiens
catagcagagagaactgccagatatkggagaactcagccagaatgcccttc

SEQ ID NO: 726 - DNA, 51 bp, Homo sapiens; identical to SEQ ID NO: 96

SEQ ID NO: 727 - DNA, 51 bp, Homo sapiens
ccaggctttttactagagagttcctyttgattttcttaccaactgtactag

SEQ ID NO: 728 - DNA, 51 bp, Homo sapiens
gcaaatggaatctctgctaatttcaytgcacgtagcaaaatagttgtgata

SEQ ID NO: 729 - DNA, 51 bp, Homo sapiens
gacactgagagaagggccgcaataaytctcatggctcctttccactttcta

SEQ ID NO: 730 - DNA, 51 bp, Homo sapiens
tttttcaaatcccacattctttttargttttgtatcagaatttgtctataa

SEQ ID NO: 731 - DNA, 51 bp, Homo sapiens
taattcctaagaacaacagagggagkacggtagaaagataagggaaaaaag

SEQ ID NO: 732 - DNA, 51 bp, Homo sapiens
tgagctgcaacagcagaccatagaakccttgaaggaaaagatctatcgcct

SEQ ID NO: 733 - DNA, 51 bp, Homo sapiens
actaataagagaatcaccacgcaggrtctatatcaaaaggtcaaagaccat

SEQ ID NO: 734 - DNA, 51 bp, Homo sapiens
tcctaaagcaagcaagaatacttttstctgggccaaattgatgaatgtttt

SEQ ID NO: 735 - DNA, 51 bp, Homo sapiens
ttttctaacggaatgtcttgagaagrtgaccagatctactatttgaatgca

SEQ ID NO: 736 - DNA, 51 bp, Homo sapiens
ctcatgggcttaatgtctctttatcrcattcattattgcattagctagaat

SEQ ID NO: 737 - DNA, 51 bp, Homo sapiens
gaatcatggctatgccttggacaacrccctccctgctggctggaaaccact

SEQ ID NO: 738 - DNA, 51 bp, Homo sapiens
ataaaatcaggatttagtgttgcttratttcagtgatatatgggcatctag

SEQ ID NO: 739 - DNA, 51 bp, Homo sapiens
aacatagagcataggaggccagggtsactctcaggtaggcctatatcagcc

SEQ ID NO: 740 - DNA, 51 bp, Homo sapiens
gatatatattaagctcctggtgctgsaagataaataggttcatggcctagt

SEQ ID NO: 741 - DNA, 51 bp, Homo sapiens
aagctcacttttccctgtgccattcrtcttccgcctatactaatgccaaaa

SEQ ID NO: 742 - DNA, 51 bp, Homo sapiens
ataaacaacaaatgtgataaacatgwaaggaaaatgagcttacttttcttc

SEQ ID NO: 743 - DNA, 51 bp, Homo sapiens
caaatatctgtcttttcagggacgcragtatggtgatcaggcagcaattac

SEQ ID NO: 744 - DNA, 51 bp, Homo sapiens; identical to SEQ ID NO: 227

SEQ ID NO: 745 - DNA, 51 bp, Homo sapiens
ttcctctatacttcaccgtcgtgaayggggatattccagacagggcaacag

SEQ ID NO: 746 - DNA, 51 bp, Homo sapiens; identical to SEQ ID NO: 235

SEQ ID NO: 747 - DNA, 51 bp, Homo sapiens
cctagattgtgtttgccaaaacttcmcttgcaatagggacactccagcaac

SEQ ID NO: 748 - DNA, 51 bp, Homo sapiens
gcttcagcaaggaaggctcctgaatytcccgaggtcctagatatgaagaaa

SEQ ID NO: 749 - DNA, 51 bp, Homo sapiens
aaactcgtaattacctggaaaagggracaaattagagcacacactaaacta

SEQ ID NO: 750 - DNA, 51 bp, Homo sapiens
gaggaacgggaactgatgcttagagraggtagaagagcagggattgtcagc

SEQ ID NO: 751 - DNA, 51 bp, Homo sapiens
atataacacatttaatcacttagcayagtgcctggacaggaacagcacaca

SEQ ID NO: 752 - DNA, 51 bp, Homo sapiens
tccgacaggatgtttgcgttcaagcyaaaactgcctcctctatccaacttg

SEQ ID NO: 753 - DNA, 51 bp, Homo sapiens
agagcatattggttactttgattaawggctgatgatattaaaacagcatag

SEQ ID NO: 754 - DNA, 51 bp, Homo sapiens
tttgagtactgagtgaaattctagtyggctgacttccagaagaaaactatc

SEQ ID NO: 755 - DNA, 51 bp, Homo sapiens
gggaaaggacagaatcaaggcatccmttggcatcacaggtagaaaaaggtg

SEQ ID NO: 756 - DNA, 51 bp, Homo sapiens
caaaccataacaagcagagtgacaargtggttagaggcatgatatttggag

SEQ ID NO: 757 - DNA, 51 bp, Homo sapiens
gcatgtggtaattgtggggctaaccrgtgattaaaggaactattacatttt

SEQ ID NO: 758 - DNA, 51 bp, Homo sapiens
cggccccgctgctcgcagccgctctyccgggagcgcccgcttaggactcac

SEQ ID NO: 759 - DNA, 51 bp, Homo sapiens
gattttatggaggaaattactttacygtggaggagagtttgtccttgaacc

SEQ ID NO: 760 - DNA, 51 bp, Homo sapiens
ctagagaataattcctcagagttacrtgagaatcaaaatatttctaagcca

SEQ ID NO: 761 - DNA, 51 bp, Homo sapiens
tttactacatccaccggggaggacawagctgttgcgcaaaatccagcgata

SEQ ID NO: 762 - DNA, 51 bp, Homo sapiens
tttgtcacttggcttaatttccacaytcttatggaaccattttactggaac

SEQ ID NO: 763 - DNA, 51 bp, Homo sapiens
tcggttcttagtaaatgtttgttgamtgagtaaatttcaagagaaaattct

SEQ ID NO: 764 - DNA, 51 bp, Homo sapiens
tgcccctttccactgagttgtctccrgactggctgatgaatagacaaggaa

SEQ ID NO: 765 - DNA, 51 bp, Homo sapiens
aacgttgctggcaatgtccataaggraaccctttctgaatatgatccagga

SEQ ID NO: 766 - DNA, 51 bp, Homo sapiens
atcggaaatccttgttttttaaggcygaacactcttccactgtatgcagat

SEQ ID NO: 767 - DNA, 51 bp, Homo sapiens
ccccattgttcagtgaaacttgccarttttgcttcttgaaagtttctcaga

SEQ ID NO: 768 - DNA, 51 bp, Homo sapiens
tagacacaaagctacacttagcaatyaaggacttgagagaatccctccagc

SEQ ID NO: 769 - DNA, 51 bp, Homo sapiens; identical to SEQ ID NO: 424

SEQ ID NO: 770 - DNA, 51 bp, Homo sapiens
gctttgggtgacacactctgaggccrtgcgaatgccctgtttctcctccaa

SEQ ID NO: 771 - DNA, 51 bp, Homo sapiens; identical to SEQ ID NO: 518

SEQ ID NO: 772 - DNA, 51 bp, Homo sapiens; identical to SEQ ID NO: 465

SEQ ID NO: 773 - DNA, 51 bp, Homo sapiens
gcaaggcctttccttggatttcccarctttctctggaagctctcgaatacc

SEQ ID NO: 774 - DNA, 51 bp, Homo sapiens
gctcccggctgaggttcaggggaatstcctcactgtccaccacacctggga

SEQ ID NO: 775 - DNA, 51 bp, Homo sapiens
taagctgacataagcattgaggaccratcttgaaataaaacaattgaaatt

SEQ ID NO: 776 - DNA, 51 bp, Homo sapiens; identical to SEQ ID NO: 298

SEQ ID NO: 777 - DNA, 51 bp, Homo sapiens
tgtaggtacctgatggttttccacaygtcgaagccatccagaggctttgtg

SEQ ID NO: 778 - DNA, 51 bp, Homo sapiens
gacctgtaaggagattcatgtaggcrttgttggtctcattaatggcaacac

SEQ ID NO: 779 - DNA, 51 bp, Homo sapiens
tgcttgtgtctttcttatgacagctrtaaaaacccacgtgggattctagta

SEQ ID NO: 780 - DNA, 51 bp, Homo sapiens
ggaaatctgacatttttagttatcasacactagagcacatgaaacccagtg

SEQ ID NO: 781 - DNA, 51 bp, Homo sapiens
ctttgttctacaagcctgaccatgtygggtgcaagagacatgaaacccagt

SEQ ID NO: 782 - DNA, 51 bp, Homo sapiens
ccatataggttataccatttttatckcactaaattcctgcatcctgtaaat

SEQ ID NO: 783 - DNA, 51 bp, Homo sapiens
taccacacacagtttcatctcattgrgtctaacagcatcctgagtttctga

SEQ ID NO: 784 - DNA, 51 bp, Homo sapiens; identical to SEQ ID NO: 414

SEQ ID NO: 785 - DNA, 51 bp, Homo sapiens; identical to SEQ ID NO: 406

SEQ ID NO: 786 - DNA, 51 bp, Homo sapiens
accactgtgttcaaccactctggtgrcatctttcaatgtggggcttgcggt

SEQ ID NO: 787 - DNA, 51 bp, Homo sapiens
atattggtttctgaagtccatcacayttttttttctggatgatttaattgt

SEQ ID NO: 788 - DNA, 51 bp, Homo sapiens
ttggcaggcataatgaaaaacaccaycactgtgatgtcacttttatgcatc

SEQ ID NO: 789 - DNA, 51 bp, Homo sapiens
agagtgtgaaacagaattcttgtgarattttgtaaaaactattgccgtcag

SEQ ID NO: 790 - DNA, 51 bp, Homo sapiens
tatttcctataattctcctatttgtyccatggcagttatctaaaaatatac

SEQ ID NO: 791 - DNA, 51 bp, Homo sapiens
aacagcagtcagaagggttaatggaraacacagaaagttataggttaggca

SEQ ID NO: 792 - DNA, 51 bp, Homo sapiens
catgacaagtctctgaataagaagtsaggctggtgagcattctgggctaaa

SEQ ID NO: 793 - DNA, 51 bp, Homo sapiens
ctacctctgagttatgccaaagcaaygtctcaggatgaacgaaatgtccct

SEQ ID NO: 794 - DNA, 51 bp, Homo sapiens
gctaaaaaaatgagacttgaaaaaayccagacttttgaagagtttaggaaa

SEQ ID NO: 795 - DNA, 51 bp, Homo sapiens
acggagtggctggaaccatgaatgaytgtctaagcccgctagcttcaggag

SEQ ID NO: 796 - DNA, 51 bp, Homo sapiens
aaataaaagcatactatttactgaargtgggaggaatccttaatagtgcac

SEQ ID NO: 797 - DNA, 51 bp, Homo sapiens
caattaacaaactcaaggtacctttyaaaaactttaaatttagcacagaag

SEQ ID NO: 798 - DNA, 51 bp, Homo sapiens
tgccctcctctagtcatacctgcctstcagtgaaacaatggaatggattat

SEQ ID NO: 799 - DNA, 51 bp, Homo sapiens
gttttctcctgtgagtttgaatttargaaccactgaagctcagcaacagta

SEQ ID NO: 800 - DNA, 51 bp, Homo sapiens
tctggtacctgtttccatttgagaartaaggagttaacagcaagtccacca

SEQ ID NO: 801 - DNA, 51 bp, Homo sapiens; identical to SEQ ID NO: 9

SEQ ID NO: 802 - DNA, 51 bp, Homo sapiens
gtcattcatgacctagtaccatttgyggcatactataattttttgataaat

SEQ ID NO: 803 - DNA, 51 bp, Homo sapiens
cgagaatatatgcttaggatcatcaygagggaagccagggctcccccaata

SEQ ID NO: 804 - DNA, 51 bp, Homo sapiens
agatggaggttgaaacaggaataagwccacacacatatggataatatttac

SEQ ID NO: 805 - DNA, 51 bp, Homo sapiens
taaatgtgcaggtatctggcattcartagagaagcaattaatgtttcctga

SEQ ID NO: 806 - DNA, 51 bp, Homo sapiens
aactatgatctaatgatcatgctccrggcacaagccatcagcacacaatgt

SEQ ID NO: 807 - DNA, 51 bp, Homo sapiens
tcaagttatggtgatatgtgtaatgyttttcacttttataggtgaaattgg

SEQ ID NO: 808 - DNA, 51 bp, Homo sapiens
aaaaattgttcagagaagtatgggawgatagttgaagggagatgaagaggc

SEQ ID NO: 809 - DNA, 51 bp, Homo sapiens
ggcacccagtgtgtataggatggacyacaattctttaaaaaaaaaatctag

SEQ ID NO: 810 - DNA, 51 bp, Homo sapiens
attgtctcttttgagagttattcctyatggaagcatgagattagggagaaa

SEQ ID NO: 811 - DNA, 51 bp, Homo sapiens
gtcgtcgctttgtccatccccagtgrcagcttcttcacctgaatgggacta

SEQ ID NO: 812 - DNA, 51 bp, Homo sapiens
tggtctcgaatgacaaaagccaggcytcccagggttatatgtccaatacta

SEQ ID NO: 813 - DNA, 51 bp, Homo sapiens
ggtggccttattgtcttcctcctacyagaaaccaagaatctgcctttgcct

SEQ ID NO: 814 - DNA, 51 bp, Homo sapiens
accatgcagaatagaacaccaagagrttcacttatttgtttattcactcac

SEQ ID NO: 815 - DNA, 51 bp, Homo sapiens
acattgcctacatctcaaggagcttyggacaccaggcagcacagagagagc

SEQ ID NO: 816 - DNA, 51 bp, Homo sapiens; identical to SEQ ID NO: 83

SEQ ID NO: 817 - DNA, 51 bp, Homo sapiens
gttagtacaagggacatttatgatgmgtaaaactgagtctctttatgctaa

SEQ ID NO: 818 - DNA, 51 bp, Homo sapiens
aatttgtggggacccattggtgagtmagatgaagacacataggttctttca

SEQ ID NO: 819 - DNA, 51 bp, Homo sapiens
ctttgtgtccccaggagccatggggygccatgttgccaccagctgccacgt

SEQ ID NO: 820 - DNA, 51 bp, Homo sapiens
tagtgggtgctagaaacttttacccrttaagtgttgagtaaataacaactc

SEQ ID NO: 821 - DNA, 51 bp, Homo sapiens
attaagactatttattttaaccttartaattgctacacataagcgaattta

SEQ ID NO: 822 - DNA, 51 bp, Homo sapiens
tcaggcctcactctttctgtattggmtttcaagagtattgtccttggtaag

SEQ ID NO: 823 - DNA, 51 bp, Homo sapiens
tctggagggtatatccaaaccatagyatttacctataggaactgagaagat

SEQ ID NO: 824 - DNA, 51 bp, Homo sapiens
cttgcaacaaccaccttccaacctayagtgtttaaaattcagtgagaggat

SEQ ID NO: 825 - DNA, 51 bp, Homo sapiens
tcattcaatcatacattcttccattyatgatacatttagtgaggcactacc

SEQ ID NO: 826 - DNA, 51 bp, Homo sapiens; identical to SEQ ID NO: 358

SEQ ID NO: 827 - DNA, 51 bp, Homo sapiens; identical to SEQ ID NO: 28

SEQ ID NO: 828 - DNA, 51 bp, Homo sapiens
cttaaaaacaggacagggagtggaakgtgtagtatgataaggaacgctgaa

SEQ ID NO: 829 - DNA, 51 bp, Homo sapiens
acgcatgggggattgtcgatgcatcyggaatcagctatttcacaatctgtt

SEQ ID NO: 830 - DNA, 51 bp, Homo sapiens; identical to SEQ ID NO: 88

SEQ ID NO: 831 - DNA, 51 bp, Homo sapiens
tatcaacttctgacaaaggcacttgsaaattcttaaaattagatattaaat

SEQ ID NO: 832 - DNA, 51 bp, Homo sapiens
gaaagaggccaagaagagatgctgcygctcttccaccatctcacccctcgt

SEQ ID NO: 833 - DNA, 51 bp, Homo sapiens
ataattcaaataaaatctcatacacrgtcttctagcctttaatttactcaa

SEQ ID NO: 834 - DNA, 51 bp, Homo sapiens
tcataaatgcctgcaagcctcaatcyattaacttaggtggtgggagaatat

SEQ ID NO: 835 - DNA, 51 bp, Homo sapiens
atttacaaatagataaccaaggtgartaggccacggtcttggggataggga

SEQ ID NO: 836 - DNA, 51 bp, Homo sapiens
tttaggaaatggtacctgaattgttscatgaatttaatcacaccttccaat

SEQ ID NO: 837 - DNA, 51 bp, Homo sapiens
tcgtcacgctacgattggtccgtggygctaaagcctgaaagcgaattcctc

SEQ ID NO: 838 - DNA, 51 bp, Homo sapiens
aagtggggtctagcctccgcaactgmcagatcgtccttatacagacaaata

SEQ ID NO: 839 - DNA, 51 bp, Homo sapiens
cagtactatttttagggatttcattycagaaatagaccagaatgtcagagc

SEQ ID NO: 840 - DNA, 51 bp, Homo sapiens
actggtaaaaggcttgctattcttaytggaaccagcaggtggcaggaaatg

SEQ ID NO: 841 - DNA, 51 bp, Homo sapiens
acttcattgtgactgacgtattgaakaatactccattttgtatgactgaat

SEQ ID NO: 842 - DNA, 51 bp, Homo sapiens
agtgctcctcctatgaggtagcaackattatccccacttgactgcagagct

SEQ ID NO: 843 - DNA, 51 bp, Homo sapiens
catggtctgaaacagatccatggtargatgctacttgttgcaaataatagc

SEQ ID NO: 844 - DNA, 51 bp, Homo sapiens; identical to SEQ ID NO: 67

SEQ ID NO: 845 - DNA, 51 bp, Homo sapiens
tccacctgtgggaaatgaaggaaacrtcaaccagtgttttccctacttctg

SEQ ID NO: 846 - DNA, 51 bp, Homo sapiens
gagaagagatggcttcactgataaayagactcacctgtccatccacctatc

SEQ ID NO: 847 - DNA, 51 bp, Homo sapiens
gggaaacactgtctagataccaagaygcttaatacattgtccctctcatca

SEQ ID NO: 848 - DNA, 51 bp, Homo sapiens; identical to SEQ ID NO: 260

SEQ ID NO: 849 - DNA, 51 bp, Homo sapiens
aataaatatgccacattataaaaaastccttgttgcaatttacctccttgt

SEQ ID NO: 850 - DNA, 51 bp, Homo sapiens
ttcttatagaatcaaccttactatgwtcctaaacttttgttctcagaaaca

SEQ ID NO: 851 - DNA, 51 bp, Homo sapiens
gagatctaaatgcctgaaactcacartaggatggcaggatatcttttgcaa

SEQ ID NO: 852 - DNA, 51 bp, Homo sapiens
aggggaaaggacatttatatggactytaataacactttggatcttgttgca

SEQ ID NO: 853 - DNA, 51 bp, Homo sapiens; identical to SEQ ID NO: 22

SEQ ID NO: 854 - DNA, 51 bp, Homo sapiens
aaaactacaggtaaataactggcacwattaaggacgttactaaggaccaaa

SEQ ID NO: 855 - DNA, 51 bp, Homo sapiens; identical to SEQ ID NO: 120

SEQ ID NO: 856 - DNA, 51 bp, Homo sapiens
gggtagcttttagattaatacaacgstataaaacccagggaatgagagaat

SEQ ID NO: 857 - DNA, 51 bp, Homo sapiens
cctcatagcctcaggtagatgtctgktctctctttgcaaatgtcccccgca

SEQ ID NO: 858 - DNA, 51 bp, Homo sapiens
tcactggtttctatggagttaccctmctgaattgaatattgaatagttaat

SEQ ID NO: 859 - DNA, 51 bp, Homo sapiens
gttcttgttgactagaacttattagygtgcgtgtggctcttggggcttgac

SEQ ID NO: 860 - DNA, 51 bp, Homo sapiens
aagtagagtttcttctcaaataagcrtgatgagatgttaggagctttatta

SEQ ID NO: 861 - DNA, 51 bp, Homo sapiens
caaggtttctgtcctgtgcaaatccwctgttatctcctgaggctgcacatc

SEQ ID NO: 862 - DNA, 51 bp, Homo sapiens
gtccacttgcaggggcaggagctgtkgaaccgctgcatactggcacagccc

SEQ ID NO: 863 - DNA, 51 bp, Homo sapiens
gcgttctacaggctcattgtggcagragagaagctgcccaggaggtgggtg

SEQ ID NO: 864 - DNA, 51 bp, Homo sapiens; identical to SEQ ID NO: 607

SEQ ID NO: 865 - DNA, 51 bp, Homo sapiens
tcaggccattaaattgccatcatgcracctatctaatgtcattatagtcca

SEQ ID NO: 866 - DNA, 51 bp, Homo sapiens; identical to SEQ ID NO: 117

SEQ ID NO: 867 - DNA, 51 bp, Homo sapiens
gatgcagaaaatcatgatgcagtatrctaatgagtctggacattggcctat

SEQ ID NO: 868 - DNA, 51 bp, Homo sapiens; identical to SEQ ID NO: 74

SEQ ID NO: 869 - DNA, 51 bp, Homo sapiens; identical to SEQ ID NO: 64

SEQ ID NO: 870 - DNA, 51 bp, Homo sapiens
ccactactcttacaccaaggtttttstatctacaattaagaatataattat

SEQ ID NO: 871 - DNA, 51 bp, Homo sapiens
tctgtctttactgttctaggattgcrgtggtctcctgtctgaaggagataa

SEQ ID NO: 872 - DNA, 51 bp, Homo sapiens
catcagccaagtcttgccattgctgrtgtggagattcgtgggacagatggg

SEQ ID NO: 873 - DNA, 51 bp, Homo sapiens
catccttccatttcttgaatcctatrgtacaatgagaagtgtcagacatag

SEQ ID NO: 874 - DNA, 51 bp, Homo sapiens
ggcggacagcacccaagacaagaagsctcccatgatgcagtctcagagccg

SEQ ID NO: 875 - DNA, 51 bp, Homo sapiens
cccttagaatataaatggtgtatgtyagtgtgaacagctaggagggcagag

SEQ ID NO: 876 - DNA, 51 bp, Homo sapiens
gaagtgccccgagcagttggtttatytcttcaaatgtgaattaatttatac

SEQ ID NO: 877 - DNA, 51 bp, Homo sapiens
gtctccgggttgttctgaaaccatcscaggaatgatgcacactgtggctga

SEQ ID NO: 878 - DNA, 51 bp, Homo sapiens
ctgactttttttctttttaattttgmgcagcttttctcagcagaagagtta

SEQ ID NO: 879 - DNA, 51 bp, Homo sapiens
acaaggggcagtgtttgtccaggagsgtgaagccttgttcgttgttcactt

SEQ ID NO: 880 - DNA, 51 bp, Homo sapiens; identical to SEQ ID NO: 445

SEQ ID NO: 881 - DNA, 51 bp, Homo sapiens
cataattaaatctcaaaccacaagasaaaatactctgtttcaagctgcata

SEQ ID NO: 882 - DNA, 51 bp, Homo sapiens
tctgggcgccatcgtgctgatccgcygctacgactgcaccttcgacctcaa

SEQ ID NO: 883 - DNA, 51 bp, Homo sapiens
atgtaagaattgcttttgaggatgtscagagaagaggaggtcctggcttca

SEQ ID NO: 884 - DNA, 51 bp, Homo sapiens
aactctttggcctaaattaatctagycttagaaccgtggaaataatgtcca

SEQ ID NO: 885 - DNA, 51 bp, Homo sapiens
acatgatcctccccatcccacactcstcatcaaaggagaagaatgagtctt

SEQ ID NO: 886 - DNA, 51 bp, Homo sapiens
ctagtgggctaaaaactcctgaagcyggggtgtgttcacccagattgagaa

SEQ ID NO: 887 - DNA, 51 bp, Homo sapiens
gctgttaaagtttcgtaggccgtaamctgatgccatgaggctctgatatgt

SEQ ID NO: 888 - DNA, 51 bp, Homo sapiens; identical to SEQ ID NO: 699

SEQ ID NO: 889 - DNA, 51 bp, Homo sapiens
cttctctgtctggccttgaaggtacragcattactattacttgtctgtcta

SEQ ID NO: 890 - DNA, 51 bp, Homo sapiens; identical to SEQ ID NO: 353

SEQ ID NO: 891 - DNA, 51 bp, Homo sapiens
aaagatatttggattaggaaattctytgtcatcatgtagcacggaagtcag

SEQ ID NO: 892 - DNA, 51 bp, Homo sapiens
caaaggccagtgtgtcagttgccttscactctagccaaagaccccccttta

SEQ ID NO: 893 - DNA, 51 bp, Homo sapiens; identical to SEQ ID NO: 661

SEQ ID NO: 894 - DNA, 51 bp, Homo sapiens
aaatactatttgtctatccttttttytccaataaggtgtggaagttggctc

SEQ ID NO: 895 - DNA, 51 bp, Homo sapiens
atgaggccaagaggaagcattaaatsatgttgggtcacgcccctttaagag

SEQ ID NO: 896 - DNA, 51 bp, Homo sapiens
tccaatcctgcctcatcccatccttkccccagggtgcagacagccatcttg

SEQ ID NO: 897 - DNA, 51 bp, Homo sapiens
gctctgcctcaggtgccaactgagcrcttgtctcttctggttcagtcctgc

SEQ ID NO: 898 - DNA, 51 bp, Homo sapiens
agcaggaatgaggctgagttctctgsggccggagcctcagttttcgactcg

SEQ ID NO: 899 - DNA, 51 bp, Homo sapiens; identical to SEQ ID NO: 698

SEQ ID NO: 900 - DNA, 51 bp, Homo sapiens
tctttgcatgttcgagagggctctgytgtgttccactgtagctggggattt

SEQ ID NO: 901 - DNA, 51 bp, Homo sapiens
tacttgggttcttctctcattccatytttccaatatggtgttgtaaataag

SEQ ID NO: 902 - DNA, 51 bp, Homo sapiens
tttctatcacatttgtattgttaacyttaatgagacagaaaaggacaaaaa

SEQ ID NO: 903 - DNA, 51 bp, Homo sapiens
gcttattagaatttaagcatgcatcwgtcaggtacccattaagaaagcttt

SEQ ID NO: 904 - DNA, 51 bp, Homo sapiens
aagaaaagatgtgacacggcttccgrtggtaaaaaacgactctatggtccc

SEQ ID NO: 905 - DNA, 51 bp, Homo sapiens
gtgtctagttgaagtcctagaaagargtattacaactgcagatttctggct

SEQ ID NO: 906 - DNA, 51 bp, Homo sapiens
caaaccctcagcccaggatagcagargccgtgggagttcaggccaaccggc

SEQ ID NO: 907 - DNA, 51 bp, Homo sapiens
ttctatattagttaaaatactgaacrctaagagttaaatgttgtgctctaa

SEQ ID NO: 908 - DNA, 51 bp, Homo sapiens
ttagcctgtattcccatgaaagatgrctccagaaacttcagaaggattgct

SEQ ID NO: 909 - DNA, 51 bp, Homo sapiens
acactcaaaaacctgattgaggggcrtacagaaatactaatactctcattg

SEQ ID NO: 910 - DNA, 51 bp, Homo sapiens
ttgttgactaactccaggcacatatrttctttcgtggagggatatttttga

SEQ ID NO: 911 - DNA, 51 bp, Homo sapiens
ttttccagtggagagttgagttttayagtctttcctgaatcaacttttgca

SEQ ID NO: 912 - DNA, 51 bp, Homo sapiens
aaatgtaatactccactcgagcatgyggcattatttaatcactgatagttc

SEQ ID NO: 913 - DNA, 51 bp, Homo sapiens; identical to SEQ ID NO: 499

SEQ ID NO: 914 - DNA, 51 bp, Homo sapiens
cccctgggctgtgattcctgtcttcytggcaatgttggggatcattgccac

SEQ ID NO: 915 - DNA, 51 bp, Homo sapiens
gggcagggcagaccccggtgccccgrtttcccaggaagacatgcaggcgat

SEQ ID NO: 916 - DNA, 51 bp, Homo sapiens; identical to SEQ ID NO: 291

SEQ ID NO: 917 - DNA, 51 bp, Homo sapiens
ttcattttatactcccagcactcccragaagcacctccacccacagagcag

SEQ ID NO: 918 - DNA, 51 bp, Homo sapiens; identical to SEQ ID NO: 330

SEQ ID NO: 919 - DNA, 51 bp, Homo sapiens; identical to SEQ ID NO: 579

SEQ ID NO: 920 - DNA, 51 bp, Homo sapiens
acagcatgtagctcgtctaaggatckgcactcaatttgtacacatgaaaga

SEQ ID NO: 921 - DNA, 51 bp, Homo sapiens; identical to SEQ ID NO: 5

SEQ ID NO: 922 - DNA, 51 bp, Homo sapiens
atcataatgttcatctcagaaaacayggtgtacaaagctgtctgtgaaaac

SEQ ID NO: 923 - DNA, 51 bp, Homo sapiens
cctagtttgacaaacatcatctcctkgatgcctcccttgttcgcagggacc

SEQ ID NO: 924 - DNA, 51 bp, Homo sapiens
atggtttataagcccagttagcacartgatttcttgagtaggaccattagg

SEQ ID NO: 925 - DNA, 51 bp, Homo sapiens
tctgggttggcagcctcgagtgcacrtgtcagtgtctgcccaagaggctgt

SEQ ID NO: 926 - DNA, 51 bp, Homo sapiens; identical to SEQ ID NO: 438

SEQ ID NO: 927 - DNA, 51 bp, Homo sapiens
taccaagaagagacaataatttcaawagaccgtaattttatctagggtaac

SEQ ID NO: 928 - DNA, 51 bp, Homo sapiens; identical to SEQ ID NO: 212

SEQ ID NO: 929 - DNA, 51 bp, Homo sapiens
cctcttttagggtgaaattggagctrttggtaacgctggtcctgctggtcc

SEQ ID NO: 930 - DNA, 51 bp, Homo sapiens
tttagattgttcattatgaagtggayttgtgtgtgtgtgcttcgctttcag

SEQ ID NO: 931 - DNA, 51 bp, Homo sapiens
aatggattagattggcttcttcaccrtagtacttttcagagcttttaagtg

SEQ ID NO: 932 - DNA, 51 bp, Homo sapiens; identical to SEQ ID NO: 622

SEQ ID NO: 933 - DNA, 51 bp, Homo sapiens; identical to SEQ ID NO: 333

SEQ ID NO: 934 - DNA, 51 bp, Homo sapiens; identical to SEQ ID NO: 614

SEQ ID NO: 935 - DNA, 51 bp, Homo sapiens; identical to SEQ ID NO: 356

SEQ ID NO: 936 - DNA, 51 bp, Homo sapiens
cagtgtctgcatctccagagtattcrtagcaacacattttcctcatcaagt

SEQ ID NO: 937 - DNA, 51 bp, Homo sapiens
ctgtcatgttgctgatctttgggtastaagaagaaatattcaggtatgggc

SEQ ID NO: 938 - DNA, 51 bp, Homo sapiens
attccatagtccatgacaatctttcycccctgccagctgcccaagcgggtc

SEQ ID NO: 939 - DNA, 51 bp, Homo sapiens; identical to SEQ ID NO: 152

SEQ ID NO: 940 - DNA, 51 bp, Homo sapiens
ttcagaagaacctgactaaattatayatacggcacacctggattcactgac

SEQ ID NO: 941 - DNA, 51 bp, Homo sapiens; identical to SEQ ID NO: 207

SEQ ID NO: 942 - DNA, 51 bp, Homo sapiens
tgaagtaaatactgtgcattcttcawactgatttgggatccttctgatact

SEQ ID NO: 943 - DNA, 51 bp, Homo sapiens
ctacaacttttatttattcaggccawttccagcagtttaaaaggtttcctt

SEQ ID NO: 944 - DNA, 51 bp, Homo sapiens
aacaaatatggcagtcgcaaatttgrtgctactttgtagacagaacagggt

SEQ ID NO: 945 - DNA, 51 bp, Homo sapiens
aggcgtgtactgttaccgtgtcaacyggcgcctgttcccggtgcctgtgga

SEQ ID NO: 946 - DNA, 51 bp, Homo sapiens
catactctgtgctctagcagttcccrtatccacgtcaggccagcttgagta

SEQ ID NO: 947 - DNA, 51 bp, Homo sapiens
tgatcacattggtttgaacggactayggttataaaagtcttattgatggaa

SEQ ID NO: 948 - DNA, 51 bp, Homo sapiens; identical to SEQ ID NO: 619

SEQ ID NO: 949 - DNA, 51 bp, Homo sapiens
gtgatgctgagggctcagagggcctrtgttaaagatgagtaggggctttta

SEQ ID NO: 950 - DNA, 51 bp, Homo sapiens
aaagtgtgctaagtttaagcaacttkggaaatttaaaatgcacacttcaaa

SEQ ID NO: 951 - DNA, 51 bp, Homo sapiens
tagctcgtgtcttcttatgaggaaaratgaaattaagtttaaagtatataa

SEQ ID NO: 952 - DNA, 51 bp, Homo sapiens
cagcttactatggaccaaacatataytatatctcatttattatcgtgtcac

SEQ ID NO: 953 - DNA, 51 bp, Homo sapiens
tatctttaccttttaaagtaggatgsatgaggtaagaggatgttcctcccc

SEQ ID NO: 954 - DNA, 51 bp, Homo sapiens
cttctctttttaagtccacttaattytcctcctgtcttcactgatcaatat

SEQ ID NO: 955 - DNA, 51 bp, Homo sapiens
caggacaccagcatgctcaatggtgktctggccaagaagaccaatgagatc

SEQ ID NO: 956 - DNA, 51 bp, Homo sapiens
atttctataaaagaaattgtatagtyttcatatgacagtctttttcccata

SEQ ID NO: 957 - DNA, 51 bp, Homo sapiens
tcctccacgctgggggactctccgtyggttgatgaccccttggagtatcag

SEQ ID NO: 958 - DNA, 51 bp, Homo sapiens
tccctctggtgcaggagagtaaaaaygcaagtctctaaaccccagcagtct

SEQ ID NO: 959 - DNA, 51 bp, Homo sapiens
agcccgtccagggagataggtatggycgaaacttcaggcaaggtgtccgag

SEQ ID NO: 960 - DNA, 51 bp, Homo sapiens; identical to SEQ ID NO: 3

SEQ ID NO: 961 - DNA, 51 bp, Homo sapiens
gggttcagatccaagcctttggaatmatgtatgaatttgaaactccctttc

SEQ ID NO: 962 - DNA, 51 bp, Homo sapiens
tgcttttgtgttgggaattgtgctgytcatttttactctacctcgttttgg

SEQ ID NO: 963 - DNA, 51 bp, Homo sapiens
atgcatacaaataaaagtaagatagyatatgaacaattcaaactaaaaaat

SEQ ID NO: 964 - DNA, 51 bp, Homo sapiens
taaagtagggtgcacactacagtaayacctctagcccacaactcccaatca

SEQ ID NO: 965 - DNA, 51 bp, Homo sapiens; identical to SEQ ID NO: 227

SEQ ID NO: 966 - DNA, 51 bp, Homo sapiens
atggggttagctcttggcaagagaayggacactcaggaggaagttggaagg

SEQ ID NO: 967 - DNA, 51 bp, Homo sapiens
acaaggtgagaatgttctgtcagggraccaaagaataggcagtcacatggg

SEQ ID NO: 968 - DNA, 51 bp, Homo sapiens
attctaccagaaaaatgtgtattgakagttcaccattgaaacaataactga

SEQ ID NO: 969 - DNA, 51 bp, Homo sapiens
ccattttataggctaataggctgttrttgtgcatatttattataacacttt

SEQ ID NO: 970 - DNA, 51 bp, Homo sapiens
tcatatattatgtgaacagtacagaygtgggaagacattatacagttcaat

SEQ ID NO: 971 - DNA, 51 bp, Homo sapiens
taggcacagtttcagtgttgttatcmgtagttaatggactgaaagccaaga

SEQ ID NO: 972 - DNA, 51 bp, Homo sapiens
atttgggggatcttgattccaccatyatctatagctccatctaggctccag

SEQ ID NO: 973 - DNA, 51 bp, Homo sapiens
aattcctaggggtttgagaaagaaasagcatggagccaacatgcccattgc

SEQ ID NO: 974 - DNA, 51 bp, Homo sapiens
gtagagtgctagagtagatctgtggytaattactgagtaccatggaggcat

SEQ ID NO: 975 - DNA, 51 bp, Homo sapiens
ggcccaaaacattctagtacatgagscttatcatctcgaatgagaatttct

SEQ ID NO: 976 - DNA, 51 bp, Homo sapiens
aagaccccactactcatcttctttastcatacaacatcttcctttctatct

SEQ ID NO: 977 - DNA, 51 bp, Homo sapiens; identical to SEQ ID NO: 52

SEQ ID NO: 978 - DNA, 51 bp, Homo sapiens
gacagctttaaatggcatccaagagkcttttgcaggcccagactggggaat

SEQ ID NO: 979 - DNA, 51 bp, Homo sapiens
agggaaccagaaccctcctgggatgyatccagtcactggtcccaagaagac

SEQ ID NO: 980 - DNA, 51 bp, Homo sapiens; identical to SEQ ID NO: 154

SEQ ID NO: 981 - DNA, 51 bp, Homo sapiens
ttcatgtcttcggcatccctgacatrgttaagggcctggtcaagtgcttcc

SEQ ID NO: 982 - DNA, 51 bp, Homo sapiens; identical to SEQ ID NO: 181

SEQ ID NO: 983 - DNA, 51 bp, Homo sapiens; identical to SEQ ID NO: 490

SEQ ID NO: 984 - DNA, 51 bp, Homo sapiens
ccaaattgattttgcttatttttgarctcaggtttttttgtgcatatatga

SEQ ID NO: 985 - DNA, 51 bp, Homo sapiens
gagctggccgccggaagcttctcggmggagcagttctgggaggcctgcgcc

SEQ ID NO: 986 - DNA, 51 bp, Homo sapiens
ttagtacgtgacctgagttaagacaytgtatatatgcaggtacatatataa

SEQ ID NO: 987 - DNA, 51 bp, Homo sapiens
ctgcgcctgcccagaaacagagaggytttgcacagcacgagctttccagaa

SEQ ID NO: 988 - DNA, 51 bp, Homo sapiens
aactgatgttaaccctttgccatcgycaatctcattgatgtcggccagtca

SEQ ID NO: 989 - DNA, 51 bp, Homo sapiens
acaccaagcttcacagagctctccaygatttgagttagagctgtctgcttt

SEQ ID NO: 990 - DNA, 51 bp, Homo sapiens; identical to SEQ ID NO: 759

SEQ ID NO: 991 - DNA, 51 bp, Homo sapiens
ttgaggggataggcaaatgatgttcrgtagagaagtttagaaattttagaa

SEQ ID NO: 992 - DNA, 51 bp, Homo sapiens
attaatatacttagactattatagtraatcacaagataaagtaaatgagta

SEQ ID NO: 993 - DNA, 51 bp, Homo sapiens
aatccgtacatagcttttgttcattkgataatcgggtgtaatatatgcaaa

SEQ ID NO: 994 - DNA, 51 bp, Homo sapiens
tggttaggatgttcacagttggtgtyagggagcagtgcagccctccatctc

SEQ ID NO: 995 - DNA, 51 bp, Homo sapiens
gtcatttagacatgaatcagaaggcraaatgtttgggcctgactagaaaga

SEQ ID NO: 996 - DNA, 51 bp, Homo sapiens; identical to SEQ ID NO: 485

SEQ ID NO: 997 - DNA, 51 bp, Homo sapiens
cagggaacagctgctgaggagcagaytggccaccacaatcaagctattttc

SEQ ID NO: 998 - DNA, 51 bp, Homo sapiens
atgtagtgctctatgccattcacccraactctgcatttgcatcagaagaat

SEQ ID NO: 999 - DNA, 51 bp, Homo sapiens
taattctgcctttaggtcaaaataaycttgatgttatcctaaacaaacaca

SEQ ID NO: 1000 - DNA, 51 bp, Homo sapiens
cttaagtgtgaaaggaaaaccaagcrcctgggtggcctactgtatggttac

SEQ ID NO: 1001 - DNA, 51 bp, Homo sapiens
aaagttccatagataagttagaaaartaaacattcaattattcctacaaag

SEQ ID NO: 1002 - DNA, 51 bp, Homo sapiens
taagtattttaggattttctaaactygtaggttggtgagggattgtccata

SEQ ID NO: 1003 - DNA, 51 bp, Homo sapiens; identical to SEQ ID NO: 536

SEQ ID NO: 1004 - DNA, 51 bp, Homo sapiens; identical to SEQ ID NO: 535

SEQ ID NO: 1005 - DNA, 51 bp, Homo sapiens; identical to SEQ ID NO: 34

SEQ ID NO: 1006 - DNA, 51 bp, Homo sapiens
gaattttatgatattaagatggtaaytgaccagaagactcagagcttgtta

SEQ ID NO: 1007 - DNA, 51 bp, Homo sapiens
aagggccgtgaccttctcactctaaraaactttaccggagaagaaattaaa

SEQ ID NO: 1008 - DNA, 51 bp, Homo sapiens
tgagaaataaagtggcatgtacaaawccccagagaatgatattccatatat

SEQ ID NO: 1009 - DNA, 51 bp, Homo sapiens
ctaagggagataagcaaataaaaagsctggtgaagagattaggagagaaaa

SEQ ID NO: 1010 - DNA, 51 bp, Homo sapiens
gaaataaaacattaacctcctttaastgtgactttaaccctcacttttaat

SEQ ID NO: 1011 - DNA, 51 bp, Homo sapiens
gtcttagggaaggtcattgccaaccrgacagtggactacgaggaggtgcac

SEQ ID NO: 1012 - DNA, 51 bp, Homo sapiens; identical to SEQ ID NO: 101

SEQ ID NO: 1013 - DNA, 51 bp, Homo sapiens; identical to SEQ ID NO: 85

SEQ ID NO: 1014 - DNA, 51 bp, Homo sapiens
ccgaagtttcatcatatggaaatgtwagatagtgtgggaaatcagtgaatg

SEQ ID NO: 1015 - DNA, 51 bp, Homo sapiens
ctatcaagctgagtgtgtttctatgkataaaagctaacaaccaacaagctg

SEQ ID NO: 1016 - DNA, 51 bp, Homo sapiens
tcctcattttacaacctgtccttgcytacaaactgtgcatttgcaaagcat

SEQ ID NO: 1017 - DNA, 51 bp, Homo sapiens
tcgccatctgcctgtacctctagacrtccatacagcttgccctgacggagg

SEQ ID NO: 1018 - DNA, 51 bp, Homo sapiens
tagctagactatcactaaagattttyttaaaaaggtcattaaggtaatttg

SEQ ID NO: 1019 - DNA, 51 bp, Homo sapiens
tctgtccagctgctgcatgcgctccygtagctgcttctcccgcacctccaa

SEQ ID NO: 1020 - DNA, 51 bp, Homo sapiens; identical to SEQ ID NO: 77

SEQ ID NO: 1021 - DNA, 51 bp, Homo sapiens
caacatgagtgtattcttctgtggarggagtctaaagcttttatcagatgc

SEQ ID NO: 1022 - DNA, 51 bp, Homo sapiens
gcaaaataatacccgcttgaaaatgrcttctaactttaacactctgtgatc

SEQ ID NO: 1023 - DNA, 51 bp, Homo sapiens
aacagagggggatttctgcagccctstgaggaagtggtgctgttatgtttc

SEQ ID NO: 1024 - DNA, 51 bp, Homo sapiens
aattttggggttttattttctgtttscataaaaatatcccattggaattct

SEQ ID NO: 1025 - DNA, 51 bp, Homo sapiens; identical to SEQ ID NO: 29

SEQ ID NO: 1026 - DNA, 51 bp, Homo sapiens; identical to SEQ ID NO: 187

SEQ ID NO: 1027 - DNA, 51 bp, Homo sapiens; identical to SEQ ID NO: 414

SEQ ID NO: 1028 - DNA, 51 bp, Homo sapiens
ccctccctttgcttcattttctcacstggcaccaattgtagcccacatgat

SEQ ID NO: 1029 - DNA, 51 bp, Homo sapiens
accagccacacccttctccatctttktcgcctcagcaaccagcatagtgcc

SEQ ID NO: 1030 - DNA, 51 bp, Homo sapiens; identical to SEQ ID NO: 109

SEQ ID NO: 1031 - DNA, 51 bp, Homo sapiens
cactctctaggtcaggggtccttaakgaagaagccacaggctccatgaact

SEQ ID NO: 1032 - DNA, 51 bp, Homo sapiens; identical to SEQ ID NO: 107

SEQ ID NO: 1033 - DNA, 51 bp, Homo sapiens
ctatccccaatgtgtatctttggacrttttacccccccaaaaatgttgaag

SEQ ID NO: 1034 - DNA, 51 bp, Homo sapiens
cgagcccgaggtcgccatcgtggccrtggtcgccatgattcagagtccgcg

SEQ ID NO: 1035 - DNA, 51 bp, Homo sapiens
aatttggaggaaagaaacacttccarttaaatgtacaatatttcctcatga

SEQ ID NO: 1036 - DNA, 51 bp, Homo sapiens
cctgatccagcaataccttccggacrtgtcagatagggctcactggccttt

SEQ ID NO: 1037 - DNA, 51 bp, Homo sapiens
aaaacctttgttatttgctgaataarcatctctttctttcttttgttttta

SEQ ID NO: 1038 - DNA, 51 bp, Homo sapiens
tgatggtcttcaatggctaagggtgkgcaactttatgctgtcagaatactg

SEQ ID NO: 1039 - DNA, 51 bp, Homo sapiens
ttcatgagaaatgtctcgtcactgtrtaaggaaagtgcttttatgttttag

SEQ ID NO: 1040 - DNA, 51 bp, Homo sapiens
tcattctacactccagaagtcacttyggagtttggacctcagcaagaacaa

SEQ ID NO: 1041 - DNA, 51 bp, Homo sapiens
cccagcaaaggggttcaaagtcatcwttcctgaacttcactgtgaggataa

SEQ ID NO: 1042 - DNA, 51 bp, Homo sapiens
ggagggagagggacacagctatttcwgcagcacaaagacgctttgtgtgat

SEQ ID NO: 1043 - DNA, 51 bp, Homo sapiens; identical to SEQ ID NO: 675

SEQ ID NO: 1044 - DNA, 51 bp, Homo sapiens
gctctagattacccatataaagtggytggttttaggcctatggcttttatt

SEQ ID NO: 1045 - DNA, 51 bp, Homo sapiens
accccaccttgtgtcagcgcctaacrcttttgcaagataagcaatcctata

SEQ ID NO: 1046 - DNA, 51 bp, Homo sapiens
gctctatcctgttgacctatctggawgaaaatggtaggcaaaaacttttaa

SEQ ID NO: 1047 - DNA, 51 bp, Homo sapiens
attcctcccaaacctcaattgcaatmtccaaactcagatttccaagagaca

SEQ ID NO: 1048 - DNA, 51 bp, Homo sapiens
aaagcaggtttgcaaatcattttccrgtacacttaatccatgcagtcaggt

SEQ ID NO: 1049 - DNA, 51 bp, Homo sapiens
aatattctcttttataggcttctacrtgattcaagtgagtttcctaaatgg

SEQ ID NO: 1050 - DNA, 51 bp, Homo sapiens
aatgtccataggtgattccacagtgyattagctgtgtcaaagatattctgg

SEQ ID NO: 1051 - DNA, 51 bp, Homo sapiens
tcacccgaggccgattgacccagaasggctttggctaagacacaggtgtta

SEQ ID NO: 1052 - DNA, 51 bp, Homo sapiens
ttgcagccccagtgctcagcacataytgcgcacaaaataggtatttgtcga

SEQ ID NO: 1053 - DNA, 51 bp, Homo sapiens
agatacagcttctcaatgtatatacrtaaatgccttgcaataaggcaaaat

SEQ ID NO: 1054 - DNA, 51 bp, Homo sapiens; identical to SEQ ID NO: 102

SEQ ID NO: 1055 - DNA, 51 bp, Homo sapiens
aacaacttctctcgttttccagggcragttagaggtgttaagttccctaat

SEQ ID NO: 1056 - DNA, 51 bp, Homo sapiens
tactatttatttgagagatcaacaartataggtcactgcaatgaaatgttt

SEQ ID NO: 1057 - DNA, 51 bp, Homo sapiens
ctggtctttctccgcagctgctctcygcttcctaccatacatctcctgtag

SEQ ID NO: 1058 - DNA, 51 bp, Homo sapiens
atcaatactaagtactttcactttcyggggtatgaagaattcatcagcact

SEQ ID NO: 1059 - DNA, 51 bp, Homo sapiens
tccaccaacagttcctatcacagatygctgcacatagtacaaattgcctga

SEQ ID NO: 1060 - DNA, 51 bp, Homo sapiens; identical to SEQ ID NO: 791

SEQ ID NO: 1061 - DNA, 51 bp, Homo sapiens
agattaaaagcttccagagacttcarctgtcccttactcatctttctaccc

SEQ ID NO: 1062 - DNA, 51 bp, Homo sapiens
aattaccccgatgtcattcaggacawactcttctctttctttctcattgtc

SEQ ID NO: 1063 - DNA, 51 bp, Homo sapiens
atgccctgtgcagccatgtggatgamcctcagctcctctatgccattgaga

SEQ ID NO: 1064 - DNA, 51 bp, Homo sapiens
ccaccaaccagccctcgagtggatcraccttcccgtgtgtgtcctcggtga

SEQ ID NO: 1065 - DNA, 51 bp, Homo sapiens
gaaggagaccaaaagccacatacttkcaaagtcatccttcctctggagacc

SEQ ID NO: 1066 - DNA, 51 bp, Homo sapiens
gtagcactagggagaaattaactcayaagaaagggaccttgacagactaaa

SEQ ID NO: 1067 - DNA, 51 bp, Homo sapiens; identical to SEQ ID NO: 35

SEQ ID NO: 1068 - DNA, 51 bp, Homo sapiens
acgattatgcatagtaaagggaccaygaggaatgttccagaggattgtctg

SEQ ID NO: 1069 - DNA, 51 bp, Homo sapiens
tggccttctccagtgagccatacttygttcccatcttagtcctttaaagtg

SEQ ID NO: 1070 - DNA, 51 bp, Homo sapiens
ctctccttcaaagcatctagcatagytgtagttttatatttacttgtacca

SEQ ID NO: 1071 - DNA, 51 bp, Homo sapiens
tgtgacaagcaaccgataggaagacktctcttcaggcagttctgtgatacc

SEQ ID NO: 1072 - DNA, 51 bp, Homo sapiens
gtggggagttttatggacaaccttgrtaagaccccactactcatcttcttt

SEQ ID NO: 1073 - DNA, 51 bp, Homo sapiens; identical to SEQ ID NO: 112

SEQ ID NO: 1074 - DNA, 51 bp, Homo sapiens
aatccttccaccaggaaacattctcygttccctgttagcaacaattaattt

SEQ ID NO: 1075 - DNA, 51 bp, Homo sapiens
taaacagcaggtgctcaataaacggyggccagtattgttatttaaggttta

SEQ ID NO: 1076 - DNA, 51 bp, Homo sapiens
tgataagatacataaaagggacaggrttaagttgctttcttcattttctat

SEQ ID NO: 1077 - DNA, 51 bp, Homo sapiens
aactctagctgccatgtgatacttaygaattccaccagtatttattggttt

SEQ ID NO: 1078 - DNA, 51 bp, Homo sapiens
caggcaagatctcgtttgtaaatttygtggattgaaagtgagggactaagt

SEQ ID NO: 1079 - DNA, 51 bp, Homo sapiens; identical to SEQ ID NO: 680

SEQ ID NO: 1080 - DNA, 51 bp, Homo sapiens
ttcatgatcccaagctgaaaggcaakccctccagagagcgttatgtgaccc

SEQ ID NO: 1081 - DNA, 51 bp, Homo sapiens
ttccagtagtgaaataacatatggtrtgcgtgcataggaactatttttagt

SEQ ID NO: 1082 - DNA, 51 bp, Homo sapiens
atttaatcttccttaaccagagtaaktcctctatctgttaaattcagtctt

SEQ ID NO: 1083 - DNA, 51 bp, Homo sapiens
ttctgcatcaggctggtagttctgtrccttaccttgccatacttcaggtca

SEQ ID NO: 1084 - DNA, 51 bp, Homo sapiens
gatcatgacacctggtgtacattggsaacagtgtaatacaatgagaaaagc

SEQ ID NO: 1085 - DNA, 51 bp, Homo sapiens
gagtagtggccctagccaaaggccaygtctcagggaagggggttgggcacc

SEQ ID NO: 1086 - DNA, 51 bp, Homo sapiens
taatagaggctcagagaatgttgttygaatgccttaccattcagggtcatt

SEQ ID NO: 1087 - DNA, 51 bp, Homo sapiens
acaagtgttaactgataagtctcttstgctgcaatgagcaaatacttaaga

SEQ ID NO: 1088 - DNA, 51 bp, Homo sapiens
tctcatttaagaatgagacagatagsaatgttcaatagaaagggaaggggg

SEQ ID NO: 1089 - DNA, 51 bp, Homo sapiens
gcaggtcttctttgaaggcctatggsaatggctactccagcaacggcaaca

SEQ ID NO: 1090 - DNA, 51 bp, Homo sapiens
gtcaaaaccaaggagaagcagcaacktgagtacctcagaagatgtttacgg

SEQ ID NO: 1091 - DNA, 51 bp, Homo sapiens
cgccctaaaggtgtattcggtgatasaaacactgaaattaaagaaccaggc

SEQ ID NO: 1092 - DNA, 51 bp, Homo sapiens
agttattactgactcgtttaagttayctttttcctcatttgaacaagtagc

SEQ ID NO: 1093 - DNA, 51 bp, Homo sapiens
aacactagattcttctgttactcatrtaagctgctgtccttgcatctttga

SEQ ID NO: 1094 - DNA, 51 bp, Homo sapiens
acaaaattccgctattagcactagasactgcgagcacaagggtgagtggtg

SEQ ID NO: 1095 - DNA, 51 bp, Homo sapiens; identical to SEQ ID NO: 114

SEQ ID NO: 1096 - DNA, 51 bp, Homo sapiens; identical to SEQ ID NO: 170

SEQ ID NO: 1097 - DNA, 51 bp, Homo sapiens
tgttttgtgctgaccattgagtgtgmtctttcattcaaaaggttcgtgtcc

SEQ ID NO: 1098 - DNA, 51 bp, Homo sapiens
caaggtatgtgtgagaatttcagaayggcagggagggcgtcactgaggtag

SEQ ID NO: 1099 - DNA, 51 bp, Homo sapiens; identical to SEQ ID NO: 125

SEQ ID NO: 1100 - DNA, 51 bp, Homo sapiens; identical to SEQ ID NO: 38

SEQ ID NO: 1101 - DNA, 51 bp, Homo sapiens; identical to SEQ ID NO: 27

SEQ ID NO: 1102 - DNA, 51 bp, Homo sapiens
gtgtggccatagtgtcaacacaggtyatggttagaccaccaatatgttgat

SEQ ID NO: 1103 - DNA, 51 bp, Homo sapiens; identical to SEQ ID NO: 8

SEQ ID NO: 1104 - DNA, 51 bp, Homo sapiens; identical to SEQ ID NO: 245

SEQ ID NO: 1105 - DNA, 51 bp, Homo sapiens; identical to SEQ ID NO: 752

SEQ ID NO: 1106 - DNA, 51 bp, Homo sapiens
tgaaaaatgatgagtctcagtgaatygtgggagtactttaagtgttcttta

SEQ ID NO: 1107 - DNA, 51 bp, Homo sapiens; identical to SEQ ID NO: 1045

SEQ ID NO: 1108 - DNA, 51 bp, Homo sapiens; identical to SEQ ID NO: 116

SEQ ID NO: 1109 - DNA, 51 bp, Homo sapiens
agaaaatataatttacagtgattttytaagttaactcattcatagctgtgt

SEQ ID NO: 1110 - DNA, 51 bp, Homo sapiens; identical to SEQ ID NO: 229

SEQ ID NO: 1111 - DNA, 51 bp, Homo sapiens; identical to SEQ ID NO: 95

SEQ ID NO: 1112 - DNA, 51 bp, Homo sapiens
ccaggccttgggggagctggcacgcrgggcccgttctccaggtggaagtag

SEQ ID NO: 1113 - DNA, 51 bp, Homo sapiens
gggtggcctctctcccacctgccaawtgccagcaccaggagtccctgggcc

SEQ ID NO: 1114 - DNA, 51 bp, Homo sapiens
acagtacaaagagcatgcacagcacrttcattcaaagaaaatgagacaaaa

SEQ ID NO: 1115 - DNA, 51 bp, Homo sapiens; identical to SEQ ID NO: 16

SEQ ID NO: 1116 - DNA, 51 bp, Homo sapiens
gcggagtggtgtatgctatttttctyttgaactgtacagcccttcatgacc

SEQ ID NO: 1117 - DNA, 51 bp, Homo sapiens
atttccaaatcgggaaaaacctgacrtcaaacagggaaatggaatttggag

SEQ ID NO: 1118 - DNA, 51 bp, Homo sapiens
gtctcgggaaggtgaccgagaaagayatctgggtacaagaacctgaatcaa

SEQ ID NO: 1119 - DNA, 51 bp, Homo sapiens
aaccaccaataaatctaggaccaagraaaacgtgttgacttttattattgt

SEQ ID NO: 1120 - DNA, 51 bp, Homo sapiens
caccctttgagagatgaatgaagacyagatggaccgagtactactgagggc

SEQ ID NO: 1121 - DNA, 51 bp, Homo sapiens; identical to SEQ ID NO: 563

SEQ ID NO: 1122 - DNA, 51 bp, Homo sapiens; identical to SEQ ID NO: 241

SEQ ID NO: 1123 - DNA, 51 bp, Homo sapiens
caatgtgttaagtgaatattactctrggagatgcatttactatatctttat

SEQ ID NO: 1124 - DNA, 51 bp, Homo sapiens
aaagatatctgtatggtgcccaaaartaatgcatacttttccacagtgtaa

SEQ ID NO: 1125 - DNA, 51 bp, Homo sapiens
tgagcaatctcaatatggtagaagcyctcctaactgaccttcctttaggta

SEQ ID NO: 1126 - DNA, 51 bp, Homo sapiens; identical to SEQ ID NO: 293

SEQ ID NO: 1127 - DNA, 51 bp, Homo sapiens; identical to SEQ ID NO: 111

SEQ ID NO: 1128 - DNA, 51 bp, Homo sapiens
tctttcccggataccacctctttatyctctcatcatacaaatgagaaaaca

SEQ ID NO: 1129 - DNA, 51 bp, Homo sapiens; identical to SEQ ID NO: 530

SEQ ID NO: 1130 - DNA, 51 bp, Homo sapiens
cccatcattatgctttttcagtgttktcttgactgttctaaattgttttct

SEQ ID NO: 1131 - DNA, 51 bp, Homo sapiens
ctcgtaacctatagaccctccagacyataaagaccaccaactgcagaaagc

SEQ ID NO: 1132 - DNA, 51 bp, Homo sapiens; identical to SEQ ID NO: 508

SEQ ID NO: 1133 - DNA, 51 bp, Homo sapiens
tatctctagtgaattcaatcctacarataaagccttccacttcaatatagc

SEQ ID NO: 1134 - DNA, 51 bp, Homo sapiens
aggaactaggtttatctatgctgggygcatgttttgagtttatacatattt

SEQ ID NO: 1135 - DNA, 51 bp, Homo sapiens
tccctttgttaccgcaaacacagtcrgaaatcatcctcggccactttgcac

SEQ ID NO: 1136 - DNA, 51 bp, Homo sapiens
aattggcttcacattttagtagtttyaatagtagctaccgacatagaaaca

SEQ ID NO: 1137 - DNA, 51 bp, Homo sapiens
gaaattatgatgcatttaacagccasgtgaagtagacagtctcattttaga

SEQ ID NO: 1138 - DNA, 51 bp, Homo sapiens
catacatctcttcaaagcagcaagtytggccatctagaaccacaatggaaa

SEQ ID NO: 1139 - DNA, 51 bp, Homo sapiens; identical to SEQ ID NO: 408

SEQ ID NO: 1140 - DNA, 51 bp, Homo sapiens
gccacttcccattagctccccacttygaaatgataaagtcaacattaaaaa

SEQ ID NO: 1141 - DNA, 51 bp, Homo sapiens
caaaaggaagtctgtttccacacctrtctcagcccagatgacttcaaagtc

SEQ ID NO: 1142 - DNA, 51 bp, Homo sapiens
cacaccggtttgtcatcatactgctrtttcccagcacctgtcaaaaccctg

SEQ ID NO: 1143 - DNA, 51 bp, Homo sapiens
agagcagaagagggtcagcatggacraacatcggagcaggaagaccaggaa

SEQ ID NO: 1144 - DNA, 51 bp, Homo sapiens
taatttcctgttccttctgaaaagarttccaacacactctgtatatcaaaa

SEQ ID NO: 1145 - DNA, 51 bp, Homo sapiens
cgacttgccatcatctccttccaagscctgtgtatgctgctcgacttcgtt

SEQ ID NO: 1146 - DNA, 51 bp, Homo sapiens
ccttgttaggcagaccatcactagayattaggcagcgcccagcctcctggg

SEQ ID NO: 1147 - DNA, 51 bp, Homo sapiens
ttctcctggtagattgtagaactgcycatctggaatttgggaaacaggcag

SEQ ID NO: 1148 - DNA, 51 bp, Homo sapiens; identical to SEQ ID NO: 263

SEQ ID NO: 1149 - DNA, 51 bp, Homo sapiens; identical to SEQ ID NO: 1055

SEQ ID NO: 1150 - DNA, 51 bp, Homo sapiens
tcctacctttagctcccgggacgccktgatcgccttgatcacctttaattc

SEQ ID NO: 1151 - DNA, 51 bp, Homo sapiens; identical to SEQ ID NO: 305

SEQ ID NO: 1152 - DNA, 51 bp, Homo sapiens; identical to SEQ ID NO: 110

SEQ ID NO: 1153 - DNA, 51 bp, Homo sapiens; identical to SEQ ID NO: 188

SEQ ID NO: 1154 - DNA, 51 bp, Homo sapiens
tctgactcagcttattaacactgggyttgtcagataattggaaaggtcaaa

SEQ ID NO: 1155 - DNA, 51 bp, Homo sapiens
ttatactcactgaggcctatgtcctygggatcccaatcataatcaacagct

SEQ ID NO: 1156 - DNA, 51 bp, Homo sapiens
ttttaaattaatttttacaggttaaragctcaggctctgtttaagtcgaga

SEQ ID NO: 1157 - DNA, 51 bp, Homo sapiens; identical to SEQ ID NO: 552

SEQ ID NO: 1158 - DNA, 51 bp, Homo sapiens
tcatttacaacagcaaacatgattaycttactgaattgaagaaacgaaagc

SEQ ID NO: 1159 - DNA, 51 bp, Homo sapiens
atttgcgcccacgtggcttgaacccygtcttggcaagcaggaagggctggt

SEQ ID NO: 1160 - DNA, 51 bp, Homo sapiens
ctgagtcctgtagagtatatctggtyaagagttgattgtttatgcttggat

SEQ ID NO: 1161 - DNA, 51 bp, Homo sapiens
gcgaggctgagctaatcagaaactgwcagcagtagcacaaacaagttaaac

SEQ ID NO: 1162 - DNA, 51 bp, Homo sapiens
tttcatatttcctgaagaaaatgcamacccatattttaaaagaaaacagaa

SEQ ID NO: 1163 - DNA, 51 bp, Homo sapiens; identical to SEQ ID NO: 264

SEQ ID NO: 1164 - DNA, 51 bp, Homo sapiens
atttaagtgcattgagcttcatatcraatctatggacactcagagtaatcc

SEQ ID NO: 1165 - DNA, 51 bp, Homo sapiens
ctcccacactcatcaagaagtttatmttgtaagtgatctacattggcacaa

SEQ ID NO: 1166 - DNA, 51 bp, Homo sapiens; identical to SEQ ID NO: 308

SEQ ID NO: 1167 - DNA, 51 bp, Homo sapiens; identical to SEQ ID NO: 595

SEQ ID NO: 1168 - DNA, 51 bp, Homo sapiens
tttggaaatctcatgcagttgagaawctcttgggaaaaatgagactctaaa

SEQ ID NO: 1169 - DNA, 51 bp, Homo sapiens; identical to SEQ ID NO: 351

SEQ ID NO: 1170 - DNA, 51 bp, Homo sapiens
agtgtgcagagaagactgagtataasacaatgggggtaagggtatatgtga

SEQ ID NO: 1171 - DNA, 51 bp, Homo sapiens; identical to SEQ ID NO: 184

SEQ ID NO: 1172 - DNA, 51 bp, Homo sapiens
aaaaacttaccaaccctgaatttgaytaccactgttgactttggcttatga

SEQ ID NO: 1173 - DNA, 51 bp, Homo sapiens
ttctctagactcaacagtgggtttcrgaagaggcccttgatagggccacaa

SEQ ID NO: 1174 - DNA, 51 bp, Homo sapiens
aatactggatggaaaacatttacaaygggataataatagagctagaaacag

SEQ ID NO: 1175 - DNA, 51 bp, Homo sapiens; identical to SEQ ID NO: 266

SEQ ID NO: 1176 - DNA, 51 bp, Homo sapiens
tcttaaatttacaagaatcctccttyctgtttattggtagcactgtgaggt

SEQ ID NO: 1177 - DNA, 51 bp, Homo sapiens
gctgagtgagttcaaagttaatttargctgagaggtcttccctgtactctt

SEQ ID NO: 1178 - DNA, 51 bp, Homo sapiens
gatcaagagacttgagaaaaacaagratcttttaacctacagccagagagt

SEQ ID NO: 1179 - DNA, 51 bp, Homo sapiens
ttggggagtagatacttcgttacttytagacttgtctctaccatttgaatt

SEQ ID NO: 1180 - DNA, 51 bp, Homo sapiens; identical to SEQ ID NO: 1007

SEQ ID NO: 1181 - DNA, 51 bp, Homo sapiens
gcggaccttgaccgcctccatgggckccagcgagacatcggggaagaactc

SEQ ID NO: 1182 - DNA, 51 bp, Homo sapiens; identical to SEQ ID NO: 83

SEQ ID NO: 1183 - DNA, 51 bp, Homo sapiens; identical to SEQ ID NO: 519

SEQ ID NO: 1184 - DNA, 51 bp, Homo sapiens; identical to SEQ ID NO: 46

SEQ ID NO: 1185 - DNA, 51 bp, Homo sapiens
aagtgccggcactggttacaaccatyacagaaagagaagaggttatacaga

SEQ ID NO: 1186 - DNA, 51 bp, Homo sapiens
tatctttatcactagcttcacttctsaaagttcttgagcttatttcagaag

SEQ ID NO: 1187 - DNA, 51 bp, Homo sapiens
gttaagacccttagagagtcctcagmatgttgcttatttttaaatttcaag

SEQ ID NO: 1188 - DNA, 51 bp, Homo sapiens
agtacaatcaaatgaagctgaaccaygtaataaaattaacagtatgcactt

SEQ ID NO: 1189 - DNA, 51 bp, Homo sapiens
catctttaaagcattaaagagccagygagctaacaagatagtgaagaatca

SEQ ID NO: 1190 - DNA, 51 bp, Homo sapiens
gccattgtccctgataggaagtgtarggtgtccaagatgacattcaaggcc

SEQ ID NO: 1191 - DNA, 51 bp, Homo sapiens
aaagcaaagcgcagtggactcctatrtttgctcttatgttttgtactgtca

SEQ ID NO: 1192 - DNA, 51 bp, Homo sapiens
gtcttgcataggtggtgccaatggcrttacagccaccaacactgtctcagg

SEQ ID NO: 1193 - DNA, 51 bp, Homo sapiens
agggacatcataaaaggctttcttawttctgcttagaggacatagaaagac

SEQ ID NO: 1194 - DNA, 51 bp, Homo sapiens; identical to SEQ ID NO: 815

SEQ ID NO: 1195 - DNA, 51 bp, Homo sapiens
tatgctgggttggcctagcagatttrgttgcaatatgagatgatatatata

SEQ ID NO: 1196 - DNA, 51 bp, Homo sapiens
tagccaagaaaatcaaatttccactrtcccgagaaggttagctctgttgtt

SEQ ID NO: 1197 - DNA, 51 bp, Homo sapiens
ctcccctcaaagatggggactgatgrgagagaagcaacctctgttcttagt

SEQ ID NO: 1198 - DNA, 51 bp, Homo sapiens
gaaaactcagaaacattcatgattcytaaggattagggaaggtgttatacg

SEQ ID NO: 1199 - DNA, 51 bp, Homo sapiens
ttcataaaatgttgtatgcagacacrgtatatttgtcttttttatcatact

SEQ ID NO: 1200 - DNA, 51 bp, Homo sapiens; identical to SEQ ID NO: 345

SEQ ID NO: 1201 - DNA, 51 bp, Homo sapiens
attatgaaatccattctcgagtggcrattttttatgatgttgtgttatcac

SEQ ID NO: 1202 - DNA, 51 bp, Homo sapiens
ggaatgtgcaaaggccacgtcagcaratggttaggtgcaatttcacgcctc

SEQ ID NO: 1203 - DNA, 51 bp, Homo sapiens
ttgcaagtgttacagaatgtcctaamaaggaaacatatgaaacctatttag

SEQ ID NO: 1204 - DNA, 51 bp, Homo sapiens; identical to SEQ ID NO: 464

SEQ ID NO: 1205 - DNA, 51 bp, Homo sapiens; identical to SEQ ID NO: 708

SEQ ID NO: 1206 - DNA, 51 bp, Homo sapiens
aggtccaaaacctatcgccttgataraaatatgatatggaaatcagtaggg

SEQ ID NO: 1207 - DNA, 51 bp, Homo sapiens
atggaaaatgtaactacaggttagtygtataaatggcagctgtactatgtg

SEQ ID NO: 1208 - DNA, 51 bp, Homo sapiens
ctgcccaccctctggcagaactccayagcttgttcagtcagattatcagtc

SEQ ID NO: 1209 - DNA, 51 bp, Homo sapiens
ctatgatgtaaagcattttccaaaaycatcttcctccaggaaagatggcat

SEQ ID NO: 1210 - DNA, 51 bp, Homo sapiens; identical to SEQ ID NO: 917

SEQ ID NO: 1211 - DNA, 51 bp, Homo sapiens; identical to SEQ ID NO: 352

SEQ ID NO: 1212 - DNA, 51 bp, Homo sapiens
aaaaacacaaaaatagacttgtaggytgggagaactatccatctagtcctt

SEQ ID NO: 1213 - DNA, 51 bp, Homo sapiens
ctcaagcattagctgacaaaaattaygaatgaagacctaagaagtaaaaaa

SEQ ID NO: 1214 - DNA, 51 bp, Homo sapiens
ttctttaacaacatggtatctagtcrctaagaccttgagcacaatgttcaa

SEQ ID NO: 1215 - DNA, 51 bp, Homo sapiens
ccactaggcaagcctcctaaaagcartatggttgtagatcactggaaaata

SEQ ID NO: 1216 - DNA, 51 bp, Homo sapiens; identical to SEQ ID NO: 876

SEQ ID NO: 1217 - DNA, 51 bp, Homo sapiens; identical to SEQ ID NO: 14

SEQ ID NO: 1218 - DNA, 51 bp, Homo sapiens
ctgctctcatgagggaagcttttagygaaaaacacaacaaatgcgacgcac

SEQ ID NO: 1219 - DNA, 51 bp, Homo sapiens
tgtgattttgtgtgtgacatttccartagttacacaccttagaccttggtc

SEQ ID NO: 1220 - DNA, 51 bp, Homo sapiens; identical to SEQ ID NO: 678

SEQ ID NO: 1221 - DNA, 51 bp, Homo sapiens
tgaaccttttttattcacaacttatyggcctttatgaaaattaaaaatgtg

SEQ ID NO: 1222 - DNA, 51 bp, Homo sapiens
aatcaaagcctttgatcatcctcttsttggtgtgacttgggaactgagggt

SEQ ID NO: 1223 - DNA, 51 bp, Homo sapiens
cccacagaggagagtgaggggcatgycaggatcactgcaagggtccctgca

SEQ ID NO: 1224 - DNA, 51 bp, Homo sapiens; identical to SEQ ID NO: 99

SEQ ID NO: 1225 - DNA, 51 bp, Homo sapiens
gcgcacggggcttcatgtgcccactycaggcctccccagccgaacatagat

SEQ ID NO: 1226 - DNA, 51 bp, Homo sapiens; identical to SEQ ID NO: 198

SEQ ID NO: 1227 - DNA, 51 bp, Homo sapiens
tcccagtttctgacactgaagaccaycctgttgctatcgctcctctacgta

SEQ ID NO: 1228 - DNA, 51 bp, Homo sapiens; identical to SEQ ID NO: 190

SEQ ID NO: 1229 - DNA, 51 bp, Homo sapiens; identical to SEQ ID NO: 794

SEQ ID NO: 1230 - DNA, 51 bp, Homo sapiens
ggtctaaagggagtgatagataagtraacaactaattaagcagaataaata

SEQ ID NO: 1231 - DNA, 51 bp, Homo sapiens; identical to SEQ ID NO: 300

SEQ ID NO: 1232 - DNA, 51 bp, Homo sapiens
tacagaaaaatgtgacttccatactycaaatggtacatacctaatttcgta

SEQ ID NO: 1233 - DNA, 51 bp, Homo sapiens
atttaaaaagatgctaaatatgagckctgagtctcaacactgtctcaagat

SEQ ID NO: 1234 - DNA, 51 bp, Homo sapiens
accctaaagctttgacattcgcctaygtaccaatgatcccaaattaacgtg

SEQ ID NO: 1235 - DNA, 51 bp, Homo sapiens
tcactgtttccatggacactgatggytctttcagcaagtacctgcagctct

SEQ ID NO: 1236 - DNA, 51 bp, Homo sapiens
gctttgtgggcgtgtgcttgtaaatktagtacaaaaatatagtcagtctga

SEQ ID NO: 1237 - DNA, 51 bp, Homo sapiens
ccagctctcagtcttttggtgactcrcgtggactccaagaccatggggctg

SEQ ID NO: 1238 - DNA, 51 bp, Homo sapiens
atttttaaaagatagattctatatgrgaaaaccttcaaattttagcatatg

SEQ ID NO: 1239 - DNA, 51 bp, Homo sapiens
cacaggctcactacaactcttttagmactttgtgatttcctgatctctttc

SEQ ID NO: 1240 - DNA, 51 bp, Homo sapiens
tgaaatgtgccctgaccatggaacayggaatttctatctaattttacagaa

SEQ ID NO: 1241 - DNA, 51 bp, Homo sapiens
gcctgagggtctcacactccttcttyagctacaggtgtgacaataagcaag

SEQ ID NO: 1242 - DNA, 51 bp, Homo sapiens
aaaggagagtgatgaatacaagaagrgaactgttatcttgctcaattcttc

SEQ ID NO: 1243 - DNA, 51 bp, Homo sapiens
aactcatcttcacagtgttccacatyatcgccatgtgctccacttttgcca

SEQ ID NO: 1244 - DNA, 51 bp, Homo sapiens
ggtctctgcttccgcaaatctccctrctactagccaaccaaagcataatgc

SEQ ID NO: 1245 - DNA, 51 bp, Homo sapiens
tagaacatgattacctcattatgtcyagatcttgaatcctggtccccagaa

SEQ ID NO: 1246 - DNA, 51 bp, Homo sapiens
caacagcctttctccatgaagttccyctgcaagaagcgtgaatcatacatg

SEQ ID NO: 1247 - DNA, 51 bp, Homo sapiens
cccttgtttatcagtaggtcagtctstgaaaactgtgtctatcaagtacac

SEQ ID NO: 1248 - DNA, 51 bp, Homo sapiens
tatgtagccacacatgcacaaaaaakaattccattggtaaatgctgtaggt

SEQ ID NO: 1249 - DNA, 51 bp, Homo sapiens
tattgtattttttattaggaaactcycattgaaaaggctatctgtaccaag

SEQ ID NO: 1250 - DNA, 51 bp, Homo sapiens; identical to SEQ ID NO: 862

SEQ ID NO: 1251 - DNA, 51 bp, Homo sapiens; identical to SEQ ID NO: 82

SEQ ID NO: 1252 - DNA, 51 bp, Homo sapiens
aggttgttcatacacattcagctagwttcttccaatggataataattctta

SEQ ID NO: 1253 - DNA, 51 bp, Homo sapiens
ggagaatgtgtgttaaccccacttcyagagaggacagaggctgggacagag

SEQ ID NO: 1254 - DNA, 51 bp, Homo sapiens
tggtgctaaagaccatgaattaacarcgatacctatctgtcttcttatagt

SEQ ID NO: 1255 - DNA, 51 bp, Homo sapiens
gcattccacagaggtggcaccagttrtgggaagagatcaatgtcacaaagc

SEQ ID NO: 1256 - DNA, 51 bp, Homo sapiens
actgatgttgtctgaaccatgattgwggtcctccaaaagttattcccttta

SEQ ID NO: 1257 - DNA, 51 bp, Homo sapiens
aatgacaaaatgtccaacacttcaaktattttcctttagaaactgtacatc

SEQ ID NO: 1258 - DNA, 51 bp, Homo sapiens
gcaatacagaaagctaaattaacttracactacaaagatgcttcatgcaga

SEQ ID NO: 1259 - DNA, 51 bp, Homo sapiens
cctagatgctagcactgactttccaygtctgctgataatccctgctgcctt

SEQ ID NO: 1260 - DNA, 51 bp, Homo sapiens
aaggcttttatttgattctatttatkaatagccattttgttcgctttgcat

SEQ ID NO: 1261 - DNA, 51 bp, Homo sapiens; identical to SEQ ID NO: 863

SEQ ID NO: 1262 - DNA, 51 bp, Homo sapiens
gaaagccacagagtgactagaggtcktatgaatcacatttgctcaagaagt

SEQ ID NO: 1263 - DNA, 51 bp, Homo sapiens
gttccaacctaaccaaaagatacagkggcaagtttggccttgaaaccctgg

SEQ ID NO: 1264 - DNA, 51 bp, Homo sapiens; identical to SEQ ID NO: 65

SEQ ID NO: 1265 - DNA, 51 bp, Homo sapiens
ttgaggggatggcagccccagttgcraagtgtcaggactgactcaagttca

SEQ ID NO: 1266 - DNA, 51 bp, Homo sapiens
tattgaccactgtctctgagcagtcytcatgatcagcatctcccacacctc

SEQ ID NO: 1267 - DNA, 51 bp, Homo sapiens; identical to SEQ ID NO: 101

SEQ ID NO: 1268 - DNA, 51 bp, Homo sapiens
ctgccttgtttactgtgctttctgaygcctacctccaaggtcaaaggggga

SEQ ID NO: 1269 - DNA, 51 bp, Homo sapiens
aagtcaaattctgcaactgtcatcawgcaaaatgtcaaatgagagaaccaa

SEQ ID NO: 1270 - DNA, 51 bp, Homo sapiens
ttgaaaagacaagatacaaacatgayagaagagaactatacaagacggtaa

SEQ ID NO: 1271 - DNA, 51 bp, Homo sapiens
tagtcctgattgaacaccacattgaycacaccttctccctttttagaagcc

SEQ ID NO: 1272 - DNA, 51 bp, Homo sapiens
gattgcgaccaggaacacgcagagaygacagtacaaagctggagctagccc

SEQ ID NO: 1273 - DNA, 51 bp, Homo sapiens
aactaggctttttccactcactgtakctcagtcaaagtctttaaagccata

SEQ ID NO: 1274 - DNA, 51 bp, Homo sapiens
cagcaactccccttctaaggccactsgctggtacctgggactcagagaatt

SEQ ID NO: 1275 - DNA, 51 bp, Homo sapiens; identical to SEQ ID NO: 517

SEQ ID NO: 1276 - DNA, 51 bp, Homo sapiens; identical to SEQ ID NO: 388

SEQ ID NO: 1277 - DNA, 51 bp, Homo sapiens
ctggccataagggtaagcttctttgmgtgtacagaaaggcctcctggcaac

SEQ ID NO: 1278 - DNA, 51 bp, Homo sapiens; identical to SEQ ID NO: 618

SEQ ID NO: 1279 - DNA, 51 bp, Homo sapiens
ctcccacatgtcctagctagtctggmtattctcttgcccattcttcctgct

SEQ ID NO: 1280 - DNA, 51 bp, Homo sapiens; identical to SEQ ID NO: 224

SEQ ID NO: 1281 - DNA, 51 bp, Homo sapiens; identical to SEQ ID NO: 856

SEQ ID NO: 1282 - DNA, 51 bp, Homo sapiens; identical to SEQ ID NO: 9

SEQ ID NO: 1283 - DNA, 51 bp, Homo sapiens
gtagagaaatcaaaatacacaatctrttctctgcttggcctttttacgccc

SEQ ID NO: 1284 - DNA, 51 bp, Homo sapiens
aattttgtgaccttggatgacatgtyacttatctcacagatcctgggaagg

SEQ ID NO: 1285 - DNA, 51 bp, Homo sapiens
tttgtgtgttacagtgtttggatgcytctatctgtataaaaatattgtgag

SEQ ID NO: 1286 - DNA, 51 bp, Homo sapiens
cttctgcagctcgtccaggtcctcgwagcccagcgtgtggtaggcgaacat

SEQ ID NO: 1287 - DNA, 51 bp, Homo sapiens
tgctgttttcttccttcaggcatacmgaggatgaccccaaagatagtggat

SEQ ID NO: 1288 - DNA, 51 bp, Homo sapiens
gtctctccttgtttgtctcctacaastgtggcaacaacacaaagcctctca

SEQ ID NO: 1289 - DNA, 51 bp, Homo sapiens
ccagaggaaacactgtcatgttggcyaatatcacaaaaactgattacaaag

SEQ ID NO: 1290 - DNA, 51 bp, Homo sapiens
aggcaactacactagcagtcaaatgyctgaggttcgcagtttgccctatca

SEQ ID NO: 1291 - DNA, 51 bp, Homo sapiens
acattgatatatgactgcgaaaggaytggaaatcagtttactctgtgtgag

SEQ ID NO: 1292 - DNA, 51 bp, Homo sapiens
agactgactgtgatcttagaaaataygcagcagtctaattcataaattgca

SEQ ID NO: 1293 - DNA, 51 bp, Homo sapiens
ctagaaagaaaattcatcagcttctyagtcttggtaacaaataaatagaag

SEQ ID NO: 1294 - DNA, 51 bp, Homo sapiens; identical to SEQ ID NO: 173

SEQ ID NO: 1295 - DNA, 51 bp, Homo sapiens
ttatactttctggaattaggtttctsaagcctcataattatccgtctactc

SEQ ID NO: 1296 - DNA, 51 bp, Homo sapiens
aaggttaaggaaggccagtgatatasagtagtagaaaacagcagttaatga

SEQ ID NO: 1297 - DNA, 51 bp, Homo sapiens; identical to SEQ ID NO: 248

SEQ ID NO: 1298 - DNA, 51 bp, Homo sapiens
atttattcagggaagggtcaattttwgtggcccaaggtacctgttcttaaa

SEQ ID NO: 1299 - DNA, 51 bp, Homo sapiens; identical to SEQ ID NO: 119

SEQ ID NO: 1300 - DNA, 51 bp, Homo sapiens; identical to SEQ ID NO: 256

SEQ ID NO: 1301 - DNA, 51 bp, Homo sapiens
taacttatttgaatttgtgaccttcstaagttgttgattgctggctaatgg

SEQ ID NO: 1302 - DNA, 51 bp, Homo sapiens
acaaacatgttggtactgggaaaagragcagactgagggatgggaaagaac

SEQ ID NO: 1303 - DNA, 51 bp, Homo sapiens
agatatacctttcaagaaagagaagrggatgtatgaccttcaaatcatgtg

SEQ ID NO: 1304 - DNA, 51 bp, Homo sapiens
tttagaaaagcctccatttcattgayccaagttggtatttcttttcttcta

SEQ ID NO: 1305 - DNA, 51 bp, Homo sapiens
actattaaagataatctttacctgtwgggcttcagaagtaacttaagtttg

SEQ ID NO: 1306 - DNA, 51 bp, Homo sapiens
ttgtcctggtttcattagcacctggytttaactaactgagcgacacggtag

SEQ ID NO: 1307 - DNA, 51 bp, Homo sapiens
taagaatgaatatgtggccgaccctrtataccgcacttttttgaagagctc

SEQ ID NO: 1308 - DNA, 51 bp, Homo sapiens
tttccagtatagcaaacttaactgcrttctcaaatagtgcattatgaacat

SEQ ID NO: 1309 - DNA, 51 bp, Homo sapiens
aacaggactgccgagggagggcatcrgactatacctgggcatgagcaggat

SEQ ID NO: 1310 - DNA, 51 bp, Homo sapiens
cctcaagcaccgctttcgggctggtrtggaccggccatcccgttgtttcct

SEQ ID NO: 1311 - DNA, 51 bp, Homo sapiens; identical to SEQ ID NO: 858

SEQ ID NO: 1312 - DNA, 51 bp, Homo sapiens; identical to SEQ ID NO: 657

SEQ ID NO: 1313 - DNA, 51 bp, Homo sapiens
caaaaattggtgaagaggaatggacmaattggatgtaatgacagtcctcat

SEQ ID NO: 1314 - DNA, 51 bp, Homo sapiens; identical to SEQ ID NO: 57

SEQ ID NO: 1315 - DNA, 51 bp, Homo sapiens
ttgttgttgttttgttttttaatacygcttaactggctttctgggtgagtg

SEQ ID NO: 1316 - DNA, 51 bp, Homo sapiens; identical to SEQ ID NO: 133

SEQ ID NO: 1317 - DNA, 51 bp, Homo sapiens; identical to SEQ ID NO: 675

SEQ ID NO: 1318 - DNA, 51 bp, Homo sapiens
taagaaatagtggcattgcccttttyaatctgaattaagctatatgataaa

SEQ ID NO: 1319 - DNA, 51 bp, Homo sapiens; identical to SEQ ID NO: 732

SEQ ID NO: 1320 - DNA, 51 bp, Homo sapiens
tgcaagcataatgacgtaagatattstcttgccgttgaataagcataatat

SEQ ID NO: 1321 - DNA, 51 bp, Homo sapiens
atgcagggcagggtgaaaaatagggscaaataacccaaactacaactccaa

SEQ ID NO: 1322 - DNA, 51 bp, Homo sapiens
cacaaaatgaaccatcacagacagarattcagcaatccctgatttacaaat

SEQ ID NO: 1323 - DNA, 51 bp, Homo sapiens
cttggagcccaccacagccttcttgycgggcagctgatggagacatgtgcc

SEQ ID NO: 1324 - DNA, 51 bp, Homo sapiens; identical to SEQ ID NO: 108

SEQ ID NO: 1325 - DNA, 51 bp, Homo sapiens
attgaccaaagcattattcattattwacatcaaattgttcaacttcatatg

SEQ ID NO: 1326 - DNA, 51 bp, Homo sapiens; identical to SEQ ID NO: 206

SEQ ID NO: 1327 - DNA, 51 bp, Homo sapiens
ttttcaggagtatccatttaaacacratactacattagtatggcacgcctc

SEQ ID NO: 1328 - DNA, 51 bp, Homo sapiens
gttacctacatagcctagttatctgwtactttaaaaaccaatgaaatatat

SEQ ID NO: 1329 - DNA, 51 bp, Homo sapiens
gtcagaaaagaatgttgaatattatsagatgcctttctatgcctacatcca

SEQ ID NO: 1330 - DNA, 51 bp, Homo sapiens
gtcagaggccaacatgaaatgactgrgagcgtgaatggacagaggccacct

SEQ ID NO: 1331 - DNA, 51 bp, Homo sapiens
gaattctcctcagatgactccatttwaaaaattcaatgaaatttctctttt

SEQ ID NO: 1332 - DNA, 51 bp, Homo sapiens
aagcaattaacctgaaaagtgttgayagttttagaaattgctacaaaattt

SEQ ID NO: 1333 - DNA, 51 bp, Homo sapiens
ctaccaatactgaactcgtagcaacrttttctttccacttctactactaat

SEQ ID NO: 1334 - DNA, 51 bp, Homo sapiens; identical to SEQ ID NO: 463

SEQ ID NO: 1335 - DNA, 51 bp, Homo sapiens
acagccccaaatgaggacattctgargccaaagctcaggtcacttctttga

SEQ ID NO: 1336 - DNA, 51 bp, Homo sapiens; identical to SEQ ID NO: 493

SEQ ID NO: 1337 - DNA, 51 bp, Homo sapiens; identical to SEQ ID NO: 80

SEQ ID NO: 1338 - DNA, 51 bp, Homo sapiens
ttttccttgtcttctacctctccttrttgactgagtcttaggaatttgtcc

SEQ ID NO: 1339 - DNA, 51 bp, Homo sapiens
ctccccaaagctcagtaaagtgggcrcttctcctatctaggcccattttaa

SEQ ID NO: 1340 - DNA, 51 bp, Homo sapiens
tgccaggggcttgaaggaaccggctyttcctttcgcagaacccaggtgttt

SEQ ID NO: 1341 - DNA, 51 bp, Homo sapiens; identical to SEQ ID NO: 612

SEQ ID NO: 1342 - DNA, 51 bp, Homo sapiens; identical to SEQ ID NO: 986

SEQ ID NO: 1343 - DNA, 51 bp, Homo sapiens
aatccggcccagcatctgaaacatcrccggaactgcacaaccagggcagct

SEQ ID NO: 1344 - DNA, 51 bp, Homo sapiens
accagtcttgttgcaggcagtggctyaccctctagtccacatccctgacct

SEQ ID NO: 1345 - DNA, 51 bp, Homo sapiens; identical to SEQ ID NO: 636

SEQ ID NO: 1346 - DNA, 51 bp, Homo sapiens
agagagacccttcaaatactgcttaygtaacttaagagtcagcaatacttg

SEQ ID NO: 1347 - DNA, 51 bp, Homo sapiens
tttgactcaattcttcgtctggtagrtgaatagaatgcagtaatcataata

SEQ ID NO: 1348 - DNA, 51 bp, Homo sapiens
aaggtgatcaaagaagtctttgtcaraaccaccaggagaatctcagggaac

SEQ ID NO: 1349 - DNA, 51 bp, Homo sapiens; identical to SEQ ID NO: 588

SEQ ID NO: 1350 - DNA, 51 bp, Homo sapiens
gatcctatactacttggatgatctawttatgggaatagctgggaatggagt

SEQ ID NO: 1351 - DNA, 51 bp, Homo sapiens; identical to SEQ ID NO: 569

SEQ ID NO: 1352 - DNA, 51 bp, Homo sapiens; identical to SEQ ID NO: 665

SEQ ID NO: 1353 - DNA, 51 bp, Homo sapiens
atcaattctgtgggggtgtcataatktggtcctgatacactgttcttggct

SEQ ID NO: 1354 - DNA, 51 bp, Homo sapiens
cactctctgtctcccgacctttcttsattgggcctactttataaagacact

SEQ ID NO: 1355 - DNA, 51 bp, Homo sapiens
tgcaatctgtgtaattcccttgcctygggtggtccacaggagcagcccaca

SEQ ID NO: 1356 - DNA, 51 bp, Homo sapiens
aaaatcaataggtatccaccaggtawaaagtaagaaagacggtgataacta

SEQ ID NO: 1357 - DNA, 51 bp, Homo sapiens
ggtcctcttgacaaacaggtgttcgyggtacacatgatttttaaaacatcc

SEQ ID NO: 1358 - DNA, 51 bp, Homo sapiens
tttccttttgtctgattactttcttygtaagatcatcatctttccatttat

SEQ ID NO: 1359 - DNA, 51 bp, Homo sapiens; identical to SEQ ID NO: 350

SEQ ID NO: 1360 - DNA, 51 bp, Homo sapiens
gtcagtcctctccctcgcacggcccmggggtagacaaaggcgtcgttgaaa

SEQ ID NO: 1361 - DNA, 51 bp, Homo sapiens
ctaccattgccaccccagtttaaaawgtatcagtggttctaatccactctt

SEQ ID NO: 1362 - DNA, 51 bp, Homo sapiens
gaaataaatagttcctgttgaaagaygacatgactgcctacatagaaaatt

SEQ ID NO: 1363 - DNA, 51 bp, Homo sapiens; identical to SEQ ID NO: 127

SEQ ID NO: 1364 - DNA, 51 bp, Homo sapiens
gctattcaacaaaattttgtgtgtayttaaggggttcaggacctccctaaa

SEQ ID NO: 1365 - DNA, 51 bp, Homo sapiens
tcttgctgggatgtctagacgtggtraaaggtttatctgctgtgcaatgga

SEQ ID NO: 1366 - DNA, 51 bp, Homo sapiens
cgataaggtactgctttaagttattytgaggtcttgcctttctatagaccc

SEQ ID NO: 1367 - DNA, 51 bp, Homo sapiens
actctcactgtttaactgggttttcyggctactgtggctaaaaacaagcta

SEQ ID NO: 1368 - DNA, 51 bp, Homo sapiens
tctgcagtttatacttaggagacgaytttcaatttaaaatgtggattctac

SEQ ID NO: 1369 - DNA, 51 bp, Homo sapiens
tgaaacctagtccacggctggcataytgcaggtcctgaaagcatcacgtgg

SEQ ID NO: 1370 - DNA, 51 bp, Homo sapiens
aacatttctattcctcctttctctcrtaagttgctaaaattttatggggtt

SEQ ID NO: 1371 - DNA, 51 bp, Homo sapiens
aaagtcctagaagaaaacacaccaarctgataacaatagttaccggggacg

SEQ ID NO: 1372 - DNA, 51 bp, Homo sapiens
gtagaaaacatgcacagaaataattrcattcagacacttgagaaagtcaag

SEQ ID NO: 1373 - DNA, 51 bp, Homo sapiens
aaagttgtattttatgctaaaatgtraacacttcttagaaacttaacgttt

SEQ ID NO: 1374 - DNA, 51 bp, Homo sapiens
tataagatccttctaacaacattttraaagcttagaaacagaagtgtaaat

SEQ ID NO: 1375 - DNA, 51 bp, Homo sapiens
caatttgagaggaggtgctcttaagsaaacgaagaacaataagtaagtaat

SEQ ID NO: 1376 - DNA, 51 bp, Homo sapiens
ctcttgtaagcactgagtcgctgtgytgctgcctagcaatgtgtgggatct

SEQ ID NO: 1377 - DNA, 51 bp, Homo sapiens
ttacataatcccatatttctcaaagrcgttgctcattttttaaaattcttt

SEQ ID NO: 1378 - DNA, 51 bp, Homo sapiens
atgtcccctcattctctggacttcamcttccataatggcacagtcatgtct

SEQ ID NO: 1379 - DNA, 51 bp, Homo sapiens
ccctggaaataaatcaggctcactgsagagcaaggcgtgctggaaggagct

SEQ ID NO: 1380 - DNA, 51 bp, Homo sapiens; identical to SEQ ID NO: 95

SEQ ID NO: 1381 - DNA, 51 bp, Homo sapiens; identical to SEQ ID NO: 27

SEQ ID NO: 1382 - DNA, 51 bp, Homo sapiens; identical to SEQ ID NO: 241

SEQ ID NO: 1383 - DNA, 51 bp, Homo sapiens; identical to SEQ ID NO: 116

SEQ ID NO: 1384 - DNA, 51 bp, Homo sapiens; identical to SEQ ID NO: 114

SEQ ID NO: 1385 - DNA, 51 bp, Homo sapiens; identical to SEQ ID NO: 8

SEQ ID NO: 1386 - DNA, 51 bp, Homo sapiens; identical to SEQ ID NO: 1097

SEQ ID NO: 1387 - DNA, 51 bp, Homo sapiens; identical to SEQ ID NO: 108

SEQ ID NO: 1388 - DNA, 51 bp, Homo sapiens; identical to SEQ ID NO: 125

SEQ ID NO: 1389 - DNA, 51 bp, Homo sapiens; identical to SEQ ID NO: 170

SEQ ID NO: 1390 - DNA, 51 bp, Homo sapiens; identical to SEQ ID NO: 305

SEQ ID NO: 1391 - DNA, 51 bp, Homo sapiens; identical to SEQ ID NO: 1112

SEQ ID NO: 1392 - DNA, 51 bp, Homo sapiens
ttactatcagtccagctgttttatcmtcagtaatttcagtttgggtaaagt

SEQ ID NO: 1393 - DNA, 51 bp, Homo sapiens; identical to SEQ ID NO: 61

SEQ ID NO: 1394 - DNA, 51 bp, Homo sapiens; identical to SEQ ID NO: 508

SEQ ID NO: 1395 - DNA, 51 bp, Homo sapiens; identical to SEQ ID NO: 127

SEQ ID NO: 1396 - DNA, 51 bp, Homo sapiens; identical to SEQ ID NO: 245

SEQ ID NO: 1397 - DNA, 51 bp, Homo sapiens; identical to SEQ ID NO: 38

SEQ ID NO: 1398 - DNA, 51 bp, Homo sapiens; identical to SEQ ID NO: 1109

SEQ ID NO: 1399 - DNA, 51 bp, Homo sapiens
catatgaatgcataatcctaaaatcraaatggagggaagaattgggaacca

SEQ ID NO: 1400 - DNA, 51 bp, Homo sapiens
cttccagccaacagccagcaagagaytgaggcccttagtccaacaacctgc

SEQ ID NO: 1401 - DNA, 51 bp, Homo sapiens; identical to SEQ ID NO: 83

SEQ ID NO: 1402 - DNA, 51 bp, Homo sapiens; identical to SEQ ID NO: 351

SEQ ID NO: 1403 - DNA, 51 bp, Homo sapiens; identical to SEQ ID NO: 1323

SEQ ID NO: 1404 - DNA, 51 bp, Homo sapiens; identical to SEQ ID NO: 1117

SEQ ID NO: 1405 - DNA, 51 bp, Homo sapiens
aatattccatggttaactctaacacygcaactactgaactactgttccaaa

SEQ ID NO: 1406 - DNA, 51 bp, Homo sapiens
gggtagtatgcctggagctgctagtrtagtcacgctgagcctggttgagga

SEQ ID NO: 1407 - DNA, 51 bp, Homo sapiens
ggcctggaaggggtggaactaaggcraggctgtgcaggtctggccccttcc

SEQ ID NO: 1408 - DNA, 51 bp, Homo sapiens; identical to SEQ ID NO: 1236

SEQ ID NO: 1409 - DNA, 51 bp, Homo sapiens
gggagttccacttctcagtcccgcakgcagccggagcctccacagacttct

SEQ ID NO: 1410 - DNA, 51 bp, Homo sapiens; identical to SEQ ID NO: 263

SEQ ID NO: 1411 - DNA, 51 bp, Homo sapiens; identical to SEQ ID NO: 530

SEQ ID NO: 1412 - DNA, 51 bp, Homo sapiens
ctccagcatttggtcagagcacttarcattaggtctgcttcctccatccag

SEQ ID NO: 1413 - DNA, 51 bp, Homo sapiens; identical to SEQ ID NO: 110

SEQ ID NO: 1414 - DNA, 51 bp, Homo sapiens
gaacgatgctgactccagccccggcrgggactatgaggaagatgagatcaa

SEQ ID NO: 1415 - DNA, 51 bp, Homo sapiens
tgggcaaaaaggaagggatattcagmgatcttatttatgcccagatgggag

SEQ ID NO: 1416 - DNA, 51 bp, Homo sapiens; identical to SEQ ID NO: 1369

SEQ ID NO: 1417 - DNA, 51 bp, Homo sapiens; identical to SEQ ID NO: 1128

SEQ ID NO: 1418 - DNA, 51 bp, Homo sapiens; identical to SEQ ID NO: 229

SEQ ID NO: 1419 - DNA, 51 bp, Homo sapiens; identical to SEQ ID NO: 1106

SEQ ID NO: 1420 - DNA, 51 bp, Homo sapiens; identical to SEQ ID NO: 100

SEQ ID NO: 1421 - DNA, 51 bp, Homo sapiens; identical to SEQ ID NO: 198

SEQ ID NO: 1422 - DNA, 51 bp, Homo sapiens; identical to SEQ ID NO: 216

SEQ ID NO: 1423 - DNA, 51 bp, Homo sapiens; identical to SEQ ID NO: 131

SEQ ID NO: 1424 - DNA, 51 bp, Homo sapiens
aattggtgtccattcaaaaatttaaractaggaatgacattgcagaggaca

SEQ ID NO: 1425 - DNA, 51 bp, Homo sapiens
agacacatggaaagatagggtgcagmacgtctccggggacccagagctgga

SEQ ID NO: 1426 - DNA, 51 bp, Homo sapiens; identical to SEQ ID NO: 1123

SEQ ID NO: 1427 - DNA, 51 bp, Homo sapiens; identical to SEQ ID NO: 277

SEQ ID NO: 1428 - DNA, 51 bp, Homo sapiens; identical to SEQ ID NO: 665

SEQ ID NO: 1429 - DNA, 51 bp, Homo sapiens; identical to SEQ ID NO: 1114

SEQ ID NO: 1430 - DNA, 51 bp, Homo sapiens; identical to SEQ ID NO: 1150

SEQ ID NO: 1431 - DNA, 51 bp, Homo sapiens; identical to SEQ ID NO: 1178

SEQ ID NO: 1432 - DNA, 51 bp, Homo sapiens; identical to SEQ ID NO: 1118

SEQ ID NO: 1433 - DNA, 51 bp, Homo sapiens; identical to SEQ ID NO: 184

SEQ ID NO: 1434 - DNA, 51 bp, Homo sapiens
taattacaagcaacagacactgagtygggcagataaagcagaaaggaattt

SEQ ID NO: 1435 - DNA, 51 bp, Homo sapiens; identical to SEQ ID NO: 1237

SEQ ID NO: 1436 - DNA, 51 bp, Homo sapiens; identical to SEQ ID NO: 248

SEQ ID NO: 1437 - DNA, 51 bp, Homo sapiens; identical to SEQ ID NO: 1

SEQ ID NO: 1438 - DNA, 51 bp, Homo sapiens; identical to SEQ ID NO: 781

SEQ ID NO: 1439 - DNA, 51 bp, Homo sapiens; identical to SEQ ID NO: 1146

SEQ ID NO: 1440 - DNA, 51 bp, Homo sapiens; identical to SEQ ID NO: 1156

SEQ ID NO: 1441 - DNA, 51 bp, Homo sapiens; identical to SEQ ID NO: 1253

SEQ ID NO: 1442 - DNA, 51 bp, Homo sapiens
agtacagagtgtgccataatatccakgtaccattcatccagcttcaaaaaa

SEQ ID NO: 1443 - DNA, 51 bp, Homo sapiens; identical to SEQ ID NO: 1138

SEQ ID NO: 1444 - DNA, 51 bp, Homo sapiens
gtaatttaaaaatgttaagatcccarcctcaataatgttcatctttcctta

SEQ ID NO: 1445 - DNA, 51 bp, Homo sapiens; identical to SEQ ID NO: 1052

SEQ ID NO: 1446 - DNA, 51 bp, Homo sapiens; identical to SEQ ID NO: 1102

SEQ ID NO: 1447 - DNA, 51 bp, Homo sapiens; identical to SEQ ID NO: 1240

SEQ ID NO: 1448 - DNA, 51 bp, Homo sapiens; identical to SEQ ID NO: 552

SEQ ID NO: 1449 - DNA, 51 bp, Homo sapiens
tacaaaatgcttttgggaggtgcaasagcaatttcttctttctctgcccaa

SEQ ID NO: 1450 - DNA, 51 bp, Homo sapiens; identical to SEQ ID NO: 1179

SEQ ID NO: 1451 - DNA, 51 bp, Homo sapiens
ccagatagaaacagctagagggaatsttgcaaaagcaggcaagatgctaaa

SEQ ID NO: 1452 - DNA, 51 bp, Homo sapiens; identical to SEQ ID NO: 46

SEQ ID NO: 1453 - DNA, 51 bp, Homo sapiens; identical to SEQ ID NO: 1133

SEQ ID NO: 1454 - DNA, 51 bp, Homo sapiens; identical to SEQ ID NO: 1212

SEQ ID NO: 1455 - DNA, 51 bp, Homo sapiens; identical to SEQ ID NO: 258

SEQ ID NO: 1456 - DNA, 51 bp, Homo sapiens
acatcatctacgttatgaaatgtgaygacaaactcaaatgattgtcaaaat

SEQ ID NO: 1457 - DNA, 51 bp, Homo sapiens; identical to SEQ ID NO: 1249

SEQ ID NO: 1458 - DNA, 51 bp, Homo sapiens; identical to SEQ ID NO: 1136

SEQ ID NO: 1459 - DNA, 51 bp, Homo sapiens
ttcctaaggaacaaggacacaacgasgtaaaaattacttggacatttcttc

SEQ ID NO: 1460 - DNA, 51 bp, Homo sapiens; identical to SEQ ID NO: 16

SEQ ID NO: 1461 - DNA, 51 bp, Homo sapiens
ctgatggagacatgtgccaggctgcrgcagctcaggtcagcgcctggaaac

SEQ ID NO: 1462 - DNA, 51 bp, Homo sapiens; identical to SEQ ID NO: 1135

SEQ ID NO: 1463 - DNA, 51 bp, Homo sapiens; identical to SEQ ID NO: 195

SEQ ID NO: 1464 - DNA, 51 bp, Homo sapiens; identical to SEQ ID NO: 1310

SEQ ID NO: 1465 - DNA, 51 bp, Homo sapiens
caccacctggctctcctgtggggctkttccgaggtgtgtgtctccgcctgc

SEQ ID NO: 1466 - DNA, 51 bp, Homo sapiens; identical to SEQ ID NO: 1159

SEQ ID NO: 1467 - DNA, 51 bp, Homo sapiens; identical to SEQ ID NO: 1158

SEQ ID NO: 1468 - DNA, 51 bp, Homo sapiens; identical to SEQ ID NO: 398

SEQ ID NO: 1469 - DNA, 51 bp, Homo sapiens; identical to SEQ ID NO: 194

SEQ ID NO: 1470 - DNA, 51 bp, Homo sapiens; identical to SEQ ID NO: 1213

SEQ ID NO: 1471 - DNA, 51 bp, Homo sapiens; identical to SEQ ID NO: 1218

SEQ ID NO: 1472 - DNA, 51 bp, Homo sapiens
gaaaaacgttttcaaaaaagccgtgktgtgaaaagaaagatgaacatagct

SEQ ID NO: 1473 - DNA, 51 bp, Homo sapiens
ttccctggtaggtattgttctcgacyttgtttctgctatagtaaaatatat

SEQ ID NO: 1474 - DNA, 51 bp, Homo sapiens; identical to SEQ ID NO: 1130

SEQ ID NO: 1475 - DNA, 51 bp, Homo sapiens; identical to SEQ ID NO: 187

SEQ ID NO: 1476 - DNA, 51 bp, Homo sapiens; identical to SEQ ID NO: 99

SEQ ID NO: 1477 - DNA, 51 bp, Homo sapiens; identical to SEQ ID NO: 52

SEQ ID NO: 1478 - DNA, 51 bp, Homo sapiens; identical to SEQ ID NO: 1164

SEQ ID NO: 1479 - DNA, 51 bp, Homo sapiens; identical to SEQ ID NO: 670

SEQ ID NO: 1480 - DNA, 51 bp, Homo sapiens
aataataaaaatgattccacaaatgraggattgggacgaaaagaagtaagt

SEQ ID NO: 1481 - DNA, 51 bp, Homo sapiens; identical to SEQ ID NO: 1141

SEQ ID NO: 1482 - DNA, 51 bp, Homo sapiens; identical to SEQ ID NO: 1309

SEQ ID NO: 1483 - DNA, 51 bp, Homo sapiens
actgataatgctcagcacagtcagckcaagataagttaaccagcttacatc

SEQ ID NO: 1484 - DNA, 51 bp, Homo sapiens
acccaagagaatctacaaaccatcasggctaatacctattaactataaaaa

SEQ ID NO: 1485 - DNA, 51 bp, Homo sapiens; identical to SEQ ID NO: 1366

SEQ ID NO: 1486 - DNA, 51 bp, Homo sapiens; identical to SEQ ID NO: 1374

SEQ ID NO: 1487 - DNA, 51 bp, Homo sapiens
tcctgcttgctttctggagttttccrtctattcttaccttcagcaattata

SEQ ID NO: 1488 - DNA, 51 bp, Homo sapiens
tggagggaagtaagccgtatgagcaytttttaaatgaatttttatttctca

SEQ ID NO: 1489 - DNA, 51 bp, Homo sapiens
atcatgaagtcagtgcatggtcacarccactaaatggactaaactggacaa

SEQ ID NO: 1490 - DNA, 51 bp, Homo sapiens; identical to SEQ ID NO: 330

SEQ ID NO: 1491 - DNA, 51 bp, Homo sapiens; identical to SEQ ID NO: 657

SEQ ID NO: 1492 - DNA, 51 bp, Homo sapiens; identical to SEQ ID NO: 1142

SEQ ID NO: 1493 - DNA, 51 bp, Homo sapiens; identical to SEQ ID NO: 1131

SEQ ID NO: 1494 - DNA, 51 bp, Homo sapiens; identical to SEQ ID NO: 569

SEQ ID NO: 1495 - DNA, 51 bp, Homo sapiens; identical to SEQ ID NO: 181

SEQ ID NO: 1496 - DNA, 51 bp, Homo sapiens; identical to SEQ ID NO: 1134

SEQ ID NO: 1497 - DNA, 51 bp, Homo sapiens
aaatggtggctgccattgccattgtkctcggatgcgactcatcttagtaga

SEQ ID NO: 1498 - DNA, 51 bp, Homo sapiens; identical to SEQ ID NO: 1279

SEQ ID NO: 1499 - DNA, 51 bp, Homo sapiens
tgtcctgtggatagtttagcgagatkgattttgagccagacaatagactct

SEQ ID NO: 1500 - DNA, 51 bp, Homo sapiens
aatgtagcaggattaaaaaatagtgyttagtcatatgtctacctaattatg

SEQ ID NO: 1501 - DNA, 51 bp, Homo sapiens
tatagtcagcaaacgggataaacaaragggattaagttccctattgaccaa

SEQ ID NO: 1502 - DNA, 51 bp, Homo sapiens; identical to SEQ ID NO: 1192

SEQ ID NO: 1503 - DNA, 51 bp, Homo sapiens
tagaggagcagtgattggcatccctmcttaacagctaaaaagactgaggtc

SEQ ID NO: 1504 - DNA, 51 bp, Homo sapiens; identical to SEQ ID NO: 952

SEQ ID NO: 1505 - DNA, 51 bp, Homo sapiens; identical to SEQ ID NO: 579

SEQ ID NO: 1506 - DNA, 51 bp, Homo sapiens; identical to SEQ ID NO: 1283

SEQ ID NO: 1507 - DNA, 51 bp, Homo sapiens; identical to SEQ ID NO: 1308

SEQ ID NO: 1508 - DNA, 51 bp, Homo sapiens; identical to SEQ ID NO: 179

SEQ ID NO: 1509 - DNA, 51 bp, Homo sapiens; identical to SEQ ID NO: 1195

SEQ ID NO: 1510 - DNA, 51 bp, Homo sapiens
atcatgcaattcaggcagggaaccartctttagaaactatacccagtttag

SEQ ID NO: 1511 - DNA, 51 bp, Homo sapiens; identical to SEQ ID NO: 1185

SEQ ID NO: 1512 - DNA, 51 bp, Homo sapiens; identical to SEQ ID NO: 354

SEQ ID NO: 1513 - DNA, 51 bp, Homo sapiens
ccaccctggcatctagtacacttggmaaacaatcaataacaacagattatc

SEQ ID NO: 1514 - DNA, 51 bp, Homo sapiens; identical to SEQ ID NO: 1189

SEQ ID NO: 1515 - DNA, 51 bp, Homo sapiens
acttgtgtaagtaacgttgtaactgkcatgataccacaatgaactttcctt

SEQ ID NO: 1516 - DNA, 51 bp, Homo sapiens; identical to SEQ ID NO: 1260

SEQ ID NO: 1517 - DNA, 51 bp, Homo sapiens
tcaacaacctaaagaatggagtgaargatggcacgtatagactcatggaaa

SEQ ID NO: 1518 - DNA, 51 bp, Homo sapiens; identical to SEQ ID NO: 1223

SEQ ID NO: 1519 - DNA, 51 bp, Homo sapiens; identical to SEQ ID NO: 1113

SEQ ID NO: 1520 - DNA, 51 bp, Homo sapiens; identical to SEQ ID NO: 1354

SEQ ID NO: 1521 - DNA, 51 bp, Homo sapiens; identical to SEQ ID NO: 1098

SEQ ID NO: 1522 - DNA, 51 bp, Homo sapiens
aaatatttacctagaactgatggtasgcaagttcctccattctggcagtag

SEQ ID NO: 1523 - DNA, 51 bp, Homo sapiens
aagatcctcacactctctcacctaakaagttgactctgaggaatagagtga

SEQ ID NO: 1524 - DNA, 51 bp, Homo sapiens; identical to SEQ ID NO: 224

SEQ ID NO: 1525 - DNA, 51 bp, Homo sapiens
ccttaaccatcacttctgctggaaamttagggtgatcaccttttcctagaa

SEQ ID NO: 1526 - DNA, 51 bp, Homo sapiens; identical to SEQ ID NO: 153

SEQ ID NO: 1527 - DNA, 51 bp, Homo sapiens
cctccccaactgaaacctcttcctcyctcgttacaaaccgtttcattgatt

SEQ ID NO: 1528 - DNA, 51 bp, Homo sapiens
gaagtaggcacttggagtaaaatggyttcactagcttggcatggtggctct

SEQ ID NO: 1529 - DNA, 51 bp, Homo sapiens; identical to SEQ ID NO: 235

SEQ ID NO: 1530 - DNA, 51 bp, Homo sapiens
ctcatacatcagattatttttacccratgaggcagtgctttctgtccacta

SEQ ID NO: 1531 - DNA, 51 bp, Homo sapiens; identical to SEQ ID NO: 91

SEQ ID NO: 1532 - DNA, 51 bp, Homo sapiens; identical to SEQ ID NO: 1284

SEQ ID NO: 1533 - DNA, 51 bp, Homo sapiens; identical to SEQ ID NO: 1198

SEQ ID NO: 1534 - DNA, 51 bp, Homo sapiens
atggttctcactagcacagaactgtsggtttgtgaggtctttttctggttg

SEQ ID NO: 1535 - DNA, 51 bp, Homo sapiens
ggttcaaatatgatcagaatattgcytttgccctggaaggagatgggaacc

SEQ ID NO: 1536 - DNA, 51 bp, Homo sapiens; identical to SEQ ID NO: 1162

SEQ ID NO: 1537 - DNA, 51 bp, Homo sapiens
ttttaaaaacaaatcattgacacgtygtaagtgctattatgacttcctaaa

SEQ ID NO: 1538 - DNA, 51 bp, Homo sapiens; identical to SEQ ID NO: 1292

SEQ ID NO: 1539 - DNA, 51 bp, Homo sapiens
atcttaggaatgcttgtttgctcacyctcttgattagttgctgtgcccttt

SEQ ID NO: 1540 - DNA, 51 bp, Homo sapiens; identical to SEQ ID NO: 751

SEQ ID NO: 1541 - DNA, 51 bp, Homo sapiens; identical to SEQ ID NO: 1186

SEQ ID NO: 1542 - DNA, 51 bp, Homo sapiens; identical to SEQ ID NO: 57

SEQ ID NO: 1543 - DNA, 51 bp, Homo sapiens
ttctttggcataatgctagaatttayaatgtcttttatgaagtgataacct

SEQ ID NO: 1544 - DNA, 51 bp, Homo sapiens; identical to SEQ ID NO: 1143

SEQ ID NO: 1545 - DNA, 51 bp, Homo sapiens; identical to SEQ ID NO: 1298

SEQ ID NO: 1546 - DNA, 51 bp, Homo sapiens
tcacgtggacagtggcaggtattgtytcactgggcttcctgcccactcagg

SEQ ID NO: 1547 - DNA, 51 bp, Homo sapiens
gcctgggtagccaaatcactgctgtrttttatgatgaaggagagaaactct

SEQ ID NO: 1548 - DNA, 51 bp, Homo sapiens; identical to SEQ ID NO: 182

SEQ ID NO: 1549 - DNA, 51 bp, Homo sapiens
gatctttgggaaaataatgccctccwtgcttctggtaaaatggccagtact

SEQ ID NO: 1550 - DNA, 51 bp, Homo sapiens; identical to SEQ ID NO: 1307

SEQ ID NO: 1551 - DNA, 51 bp, Homo sapiens; identical to SEQ ID NO: 694

SEQ ID NO: 1552 - DNA, 51 bp, Homo sapiens
attgcttgttgagtgaacagggaatygtagaactcaaatataccctggttg

SEQ ID NO: 1553 - DNA, 51 bp, Homo sapiens; identical to SEQ ID NO: 1234

SEQ ID NO: 1554 - DNA, 51 bp, Homo sapiens
tctttagcttgaagaaaatctaaccrgcaatccattcactcatttattcat

SEQ ID NO: 1555 - DNA, 51 bp, Homo sapiens
gaggcaatttcccctttttgatgggragagtgttttatctttgtgagttct

SEQ ID NO: 1556 - DNA, 51 bp, Homo sapiens; identical to SEQ ID NO: 1222

SEQ ID NO: 1557 - DNA, 51 bp, Homo sapiens; identical to SEQ ID NO: 128

SEQ ID NO: 1558 - DNA, 51 bp, Homo sapiens
agaacacactggcaaatagcaaaagygacaccatctttcttctaatctgct

SEQ ID NO: 1559 - DNA, 51 bp, Homo sapiens
tgctggcttcaagtctcctactgggwtgtcttgcagaaccatgaaggaaaa

SEQ ID NO: 1560 - DNA, 51 bp, Homo sapiens
taatgtcccaggtgtttttccaataycctactccttcatctgccctcatgt

SEQ ID NO: 1561 - DNA, 51 bp, Homo sapiens
acttaaaggtataaagcaaatgttcyaaaaaagtacagataaagcaaatct

SEQ ID NO: 1562 - DNA, 51 bp, Homo sapiens; identical to SEQ ID NO: 1378

SEQ ID NO: 1563 - DNA, 51 bp, Homo sapiens; identical to SEQ ID NO: 293

SEQ ID NO: 1564 - DNA, 51 bp, Homo sapiens
acggtatagtgcaaatcctgacggtrggttctacaattatgctaatagatt

SEQ ID NO: 1565 - DNA, 51 bp, Homo sapiens
tgaagttgtgaatcaaatttgaggascaaataatacttaacatttattgag

SEQ ID NO: 1566 - DNA, 51 bp, Homo sapiens
cctctcttgatctggatgaccttggmgattccgggttgattttgattccca

SEQ ID NO: 1567 - DNA, 51 bp, Homo sapiens; identical to SEQ ID NO: 1340

SEQ ID NO: 1568 - DNA, 51 bp, Homo sapiens; identical to SEQ ID NO: 563

SEQ ID NO: 1569 - DNA, 51 bp, Homo sapiens
gacagacttgagtttcatacttgctrgccatgagacattgggttacttttc

SEQ ID NO: 1570 - DNA, 51 bp, Homo sapiens
gtatgaaaggtttttgatcatgtcawttcaatttgtcccacacaacatgtc

SEQ ID NO: 1571 - DNA, 51 bp, Homo sapiens
aacccaagaaataacctgcactgggrtacacattagtaccttcattcaata

SEQ ID NO: 1572 - DNA, 51 bp, Homo sapiens
agaagaagaggaggtgagagtcctgstgtgttgttgagaatagttctggat

SEQ ID NO: 1573 - DNA, 51 bp, Homo sapiens; identical to SEQ ID NO: 1333

SEQ ID NO: 1574 - DNA, 51 bp, Homo sapiens; identical to SEQ ID NO: 478

SEQ ID NO: 1575 - DNA, 51 bp, Homo sapiens
cattctcaaagatcattggcaaaagyatggccggaatttcttcaccaggtg

SEQ ID NO: 1576 - DNA, 51 bp, Homo sapiens
cgtgcagtgttgcctcccatgctacratacaagcccaccaaggcagagtca

SEQ ID NO: 1577 - DNA, 51 bp, Homo sapiens
caacctctttctcttcctgtttgcasttggcttttacctgcttcttagggt

SEQ ID NO: 1578 - DNA, 51 bp, Homo sapiens
cagtttcctgtgtgtgaagtggggamgtgtcatctcccccttgggattgtt

SEQ ID NO: 1579 - DNA, 51 bp, Homo sapiens; identical to SEQ ID NO: 80

SEQ ID NO: 1580 - DNA, 51 bp, Homo sapiens
agggagaaggtacttggacccacagmagagtacgggacggaaggattaggg

SEQ ID NO: 1581 - DNA, 51 bp, Homo sapiens
taggaagtcaaactctgttttttgtrtatatgagaaaaaagtcaaatcagt

SEQ ID NO: 1582 - DNA, 51 bp, Homo sapiens; identical to SEQ ID NO: 119

SEQ ID NO: 1583 - DNA, 51 bp, Homo sapiens
gcactgattaaagtgctcctaacaarcagcagccaatactgcccaggggtg

SEQ ID NO: 1584 - DNA, 51 bp, Homo sapiens
accaaagacctacatccagagacttkatttacctatttaagcccacatgac

SEQ ID NO: 1585 - DNA, 51 bp, Homo sapiens
gcagagggctgaaatatgcccgactrgatatgaggcgatgacactaattat

SEQ ID NO: 1586 - DNA, 51 bp, Homo sapiens; identical to SEQ ID NO: 943

SEQ ID NO: 1587 - DNA, 51 bp, Homo sapiens
aggggaaacactccatgctgggtaastggcatagaatgaaaggaactgtta

SEQ ID NO: 1588 - DNA, 51 bp, Homo sapiens
taagcctccagatcatcatcctcatyagaggtaaccggagcccagctggcc

SEQ ID NO: 1589 - DNA, 51 bp, Homo sapiens; identical to SEQ ID NO: 1215

SEQ ID NO: 1590 - DNA, 51 bp, Homo sapiens
ctgacctctgtttcctcatcaataaraggatcaatggtcaccagcctgaag

SEQ ID NO: 1591 - DNA, 51 bp, Homo sapiens; identical to SEQ ID NO: 213

SEQ ID NO: 1592 - DNA, 51 bp, Homo sapiens; identical to SEQ ID NO: 1191

SEQ ID NO: 1593 - DNA, 51 bp, Homo sapiens
tggcccggatccaagattctagagtstggtttgcattctggcctttatatt

SEQ ID NO: 1594 - DNA, 51 bp, Homo sapiens; identical to SEQ ID NO: 111

SEQ ID NO: 1595 - DNA, 51 bp, Homo sapiens
gtggagcacaggaagagaggggatcrcctgcagaacctgtcctcttgaaga

SEQ ID NO: 1596 - DNA, 51 bp, Homo sapiens; identical to SEQ ID NO: 501

SEQ ID NO: 1597 - DNA, 51 bp, Homo sapiens
agacaaaagcaaaacattgatggacrtggctctgatgatagtaaaaataag

SEQ ID NO: 1598 - DNA, 51 bp, Homo sapiens
atctcaagcagggcccactccaaaaygtgagatagataagtctagcatcaa

SEQ ID NO: 1599 - DNA, 51 bp, Homo sapiens; identical to SEQ ID NO: 1144

SEQ ID NO: 1600 - DNA, 51 bp, Homo sapiens
tccctgctcctctctcatctttaagytgtgcaaatgttgctctgctcctaa

SEQ ID NO: 1601 - DNA, 51 bp, Homo sapiens; identical to SEQ ID NO: 314

SEQ ID NO: 1602 - DNA, 51 bp, Homo sapiens
tgcataggggaagcgagtatgcttgsaatgagtttacactttagagtcaaa

SEQ ID NO: 1603 - DNA, 51 bp, Homo sapiens
tatcttcctaaagcagagccaaaaaygttgctcttccaactaaacattttc

SEQ ID NO: 1604 - DNA, 51 bp, Homo sapiens
attggtgttctcaggattactaacawatgtaggtgcataagaatagctcgt

SEQ ID NO: 1605 - DNA, 51 bp, Homo sapiens
ggaccaaacagttccgataagcaaamaaaatctctcagacaattatgttct

SEQ ID NO: 1606 - DNA, 51 bp, Homo sapiens
cttcctcacctgagacacaacagaargttggttttgagatgaatgtggggc

SEQ ID NO: 1607 - DNA, 51 bp, Homo sapiens; identical to SEQ ID NO: 788

SEQ ID NO: 1608 - DNA, 51 bp, Homo sapiens; identical to SEQ ID NO: 1187

SEQ ID NO: 1609 - DNA, 51 bp, Homo sapiens
tatgagtctgggccagctggaaacasgtctgggatcttccaagaaagtcct

SEQ ID NO: 1610 - DNA, 51 bp, Homo sapiens; identical to SEQ ID NO: 395

SEQ ID NO: 1611 - DNA, 51 bp, Homo sapiens
gatctctagtcacttgccaacacggyttctctcttatctgccagaattgtt

SEQ ID NO: 1612 - DNA, 51 bp, Homo sapiens; identical to SEQ ID NO: 636

SEQ ID NO: 1613 - DNA, 51 bp, Homo sapiens
tctctccagctgagccaggcgagaargcacacctaggtcagtctctctcac

SEQ ID NO: 1614 - DNA, 51 bp, Homo sapiens; identical to SEQ ID NO: 1203

SEQ ID NO: 1615 - DNA, 51 bp, Homo sapiens
acattggctgcgaagtacggtccacrctctccctgcagccatcagcccctc

SEQ ID NO: 1616 - DNA, 51 bp, Homo sapiens
catattgtcaacaacctctctatagygaccaaaggagttcagggcctgcaa

SEQ ID NO: 1617 - DNA, 51 bp, Homo sapiens; identical to SEQ ID NO: 675

SEQ ID NO: 1618 - DNA, 51 bp, Homo sapiens; identical to SEQ ID NO: 1233

SEQ ID NO: 1619 - DNA, 51 bp, Homo sapiens; identical to SEQ ID NO: 1303

SEQ ID NO: 1620 - DNA, 51 bp, Homo sapiens; identical to SEQ ID NO: 1290

SEQ ID NO: 1621 - DNA, 51 bp, Homo sapiens
agggtgactactatgtacccagggcrttaggcattgcaggtcaacactaag

SEQ ID NO: 1622 - DNA, 51 bp, Homo sapiens
ttgaaaatcggatgaaagctgtgatyttgcttctgcaaatgtatgcacgct

SEQ ID NO: 1623 - DNA, 51 bp, Homo sapiens; identical to SEQ ID NO: 605

SEQ ID NO: 1624 - DNA, 51 bp, Homo sapiens; identical to SEQ ID NO: 427

SEQ ID NO: 1625 - DNA, 51 bp, Homo sapiens
ccagatccaggtgaaagaaggacctwgtcactacattgcaaaccccttctg

SEQ ID NO: 1626 - DNA, 51 bp, Homo sapiens
tgaagaggaggtagaaacatgcctastttgattttgaaactggaagaagag

SEQ ID NO: 1627 - DNA, 51 bp, Homo sapiens
ctgagggtctcttgtctttcctcagrtgaatgtggaaggcatccactgtga

SEQ ID NO: 1628 - DNA, 51 bp, Homo sapiens; identical to SEQ ID NO: 1296

SEQ ID NO: 1629 - DNA, 51 bp, Homo sapiens
ttgcacttggaccagcacagaggtgytcacagggcgggtggggggctgtcc

SEQ ID NO: 1630 - DNA, 51 bp, Homo sapiens
ctcctctcatgtaatgcaacccactrtgtgtgtggccaactagcccactac

SEQ ID NO: 1631 - DNA, 51 bp, Homo sapiens; identical to SEQ ID NO: 133

SEQ ID NO: 1632 - DNA, 51 bp, Homo sapiens
tgcagtgacctgaaataatgtaacartgtgaggtgtcatgaacaaaaacca

SEQ ID NO: 1633 - DNA, 51 bp, Homo sapiens; identical to SEQ ID NO: 861

SEQ ID NO: 1634 - DNA, 51 bp, Homo sapiens; identical to SEQ ID NO: 638

SEQ ID NO: 1635 - DNA, 51 bp, Homo sapiens; identical to SEQ ID NO: 188

SEQ ID NO: 1636 - DNA, 51 bp, Homo sapiens; identical to SEQ ID NO: 30

SEQ ID NO: 1637 - DNA, 51 bp, Homo sapiens
cttggagagaggcagtctgagaactmccctaacaaggaggatgtggggaat

SEQ ID NO: 1638 - DNA, 51 bp, Homo sapiens
ttttaccctctctgaaactgaaatakaaatccttttatggcggataaaatc

SEQ ID NO: 1639 - DNA, 51 bp, Homo sapiens
acacctaatcataattgctaggtagrggtaatacagggctttaaggatgga

SEQ ID NO: 1640 - DNA, 51 bp, Homo sapiens
tctctagataatgatgaatgtagcaygcattcacataaggtttttgctgac

SEQ ID NO: 1641 - DNA, 51 bp, Homo sapiens
gtgaggggatagacagaaagattcayggaggccgagcacggtggctcatgt

SEQ ID NO: 1642 - DNA, 51 bp, Homo sapiens
gacacataatttccaaatctgctacrttccagtgggtaaatgaataatcag

SEQ ID NO: 1643 - DNA, 51 bp, Homo sapiens; identical to SEQ ID NO: 443

SEQ ID NO: 1644 - DNA, 51 bp, Homo sapiens
gatttcttgccctgttacccttacaygtggctgtttgccatggtctgtcaa

SEQ ID NO: 1645 - DNA, 51 bp, Homo sapiens
gcccatctaccctggctatgacatgwtgttcatccacaacgattgcaaagt

SEQ ID NO: 1646 - DNA, 51 bp, Homo sapiens
accagaaaaaaataatgattacatgracaaatgggcaggactcttaggtcc

SEQ ID NO: 1647 - DNA, 51 bp, Homo sapiens
accagtcatcaatactgatgatttargcaagtaaaagtgatgtggaaaaca

SEQ ID NO: 1648 - DNA, 51 bp, Homo sapiens
gtagatgttaatatgtaggtgtagayagatgctaatatatgtgatagacag

SEQ ID NO: 1649 - DNA, 51 bp, Homo sapiens; identical to SEQ ID NO: 1196

SEQ ID NO: 1650 - DNA, 51 bp, Homo sapiens
agctacatgtaatcaaatatgcaaargcatcttccagattaagagaactgt

SEQ ID NO: 1651 - DNA, 51 bp, Homo sapiens; identical to SEQ ID NO: 47

SEQ ID NO: 1652 - DNA, 51 bp, Homo sapiens
atttttattacacaatgtggcatttktcagaccatccctaggttgttttgt

SEQ ID NO: 1653 - DNA, 51 bp, Homo sapiens; identical to SEQ ID NO: 1172

SEQ ID NO: 1654 - DNA, 51 bp, Homo sapiens; identical to SEQ ID NO: 252

SEQ ID NO: 1655 - DNA, 51 bp, Homo sapiens
gacacctgaaaccagggaccaaactrctttttgagaggagcccaaggttta

SEQ ID NO: 1656 - DNA, 51 bp, Homo sapiens; identical to SEQ ID NO: 1286

SEQ ID NO: 1657 - DNA, 51 bp, Homo sapiens; identical to SEQ ID NO: 697

SEQ ID NO: 1658 - DNA, 51 bp, Homo sapiens; identical to SEQ ID NO: 794

SEQ ID NO: 1659 - DNA, 51 bp, Homo sapiens
aagctgcattatagaacacaataacraaacagatgatggtctgtatacatg

SEQ ID NO: 1660 - DNA, 51 bp, Homo sapiens; identical to SEQ ID NO: 1246

SEQ ID NO: 1661 - DNA, 51 bp, Homo sapiens
aagattagatgagtttaggtgttgtyggccacagtgatggcactgattgtc

SEQ ID NO: 1662 - DNA, 51 bp, Homo sapiens
ttttgctctattcccaatctaggatragagactatgaaggtccatggaacc

SEQ ID NO: 1663 - DNA, 51 bp, Homo sapiens
gtgtaagttgtaatcacacaaaggcrtaatcatgaaaagtagtaaaacata

SEQ ID NO: 1664 - DNA, 51 bp, Homo sapiens
gctcagagagggaacaaatggcttayttaggccaccattttcttgagccat

SEQ ID NO: 1665 - DNA, 51 bp, Homo sapiens
agaccacattggaaagtcaatgccamatgtcctagaagatgaagtatatga

SEQ ID NO: 1666 - DNA, 51 bp, Homo sapiens
agtggcatacagagaaacttaatgcyttacatagtcattcatttaaaactc

SEQ ID NO: 1667 - DNA, 51 bp, Homo sapiens
aaataaaggcaaacccatgaggcaawgaatgtttttaagtttgtcaaaaat

SEQ ID NO: 1668 - DNA, 51 bp, Homo sapiens; identical to SEQ ID NO: 1173

SEQ ID NO: 1669 - DNA, 51 bp, Homo sapiens; identical to SEQ ID NO: 878

SEQ ID NO: 1670 - DNA, 51 bp, Homo sapiens; identical to SEQ ID NO: 1256

SEQ ID NO: 1671 - DNA, 51 bp, Homo sapiens; identical to SEQ ID NO: 1362

SEQ ID NO: 1672 - DNA, 51 bp, Homo sapiens; identical to SEQ ID NO: 1321

SEQ ID NO: 1673 - DNA, 51 bp, Homo sapiens
gaaaaagtcacttggttcacctgctrgattcagagaactttaatcagcgtc

SEQ ID NO: 1674 - DNA, 51 bp, Homo sapiens; identical to SEQ ID NO: 399

SEQ ID NO: 1675 - DNA, 51 bp, Homo sapiens
gccaaatggtgataggtcagttaccsctactctttgcataacctgtttata

SEQ ID NO: 1676 - DNA, 51 bp, Homo sapiens
agatctgaagggtgtgatcaacctcyctggggtttgacaggttactgtcct

SEQ ID NO: 1677 - DNA, 51 bp, Homo sapiens; identical to SEQ ID NO: 862

SEQ ID NO: 1678 - DNA, 51 bp, Homo sapiens
gcctggatcacagtaagtcctcattkataattagttaacattattattagt

SEQ ID NO: 1679 - DNA, 51 bp, Homo sapiens; identical to SEQ ID NO: 1371

SEQ ID NO: 1680 - DNA, 51 bp, Homo sapiens; identical to SEQ ID NO: 1263

SEQ ID NO: 1681 - DNA, 51 bp, Homo sapiens; identical to SEQ ID NO: 594

SEQ ID NO: 1682 - DNA, 51 bp, Homo sapiens; identical to SEQ ID NO: 411

SEQ ID NO: 1683 - DNA, 51 bp, Homo sapiens; identical to SEQ ID NO: 201

SEQ ID NO: 1684 - DNA, 51 bp, Homo sapiens; identical to SEQ ID NO: 219

SEQ ID NO: 1685 - DNA, 51 bp, Homo sapiens
ttggggccagggctctgcacctggaraggctttataacgtgagattctcaa

SEQ ID NO: 1686 - DNA, 51 bp, Homo sapiens
cctgctggctctctccttttcaagtygctttttatcctctacaatatcttg

SEQ ID NO: 1687 - DNA, 51 bp, Homo sapiens; identical to SEQ ID NO: 1285

SEQ ID NO: 1688 - DNA, 51 bp, Homo sapiens
aagttccattgaaattggagtgttayctattagatggcctctgttgatttt

SEQ ID NO: 1689 - DNA, 51 bp, Homo sapiens
gtagcttagtacttagaattatcccrgaagtgaacaacatcagtaaggtct

SEQ ID NO: 1690 - DNA, 51 bp, Homo sapiens
taatccaatggcaaaggtcatccctytctgaagagctcctttagttactga

SEQ ID NO: 1691 - DNA, 51 bp, Homo sapiens; identical to SEQ ID NO: 1301

SEQ ID NO: 1692 - DNA, 51 bp, Homo sapiens
gtaaattctcaaataaatggtagccrctgctatttaggaacctaagctctt

SEQ ID NO: 1693 - DNA, 51 bp, Homo sapiens
atatacacgtatagaatctgtacgcrttgaacaacttggttcaagatggtg

SEQ ID NO: 1694 - DNA, 51 bp, Homo sapiens
atgggaatttcttcaaagtctggtgrtcttttgactgcatgttttccaaat

SEQ ID NO: 1695 - DNA, 51 bp, Homo sapiens
tgttcagggaaaagtatacatgattytgttcaaagttctctaggaatagtt

SEQ ID NO: 1696 - DNA, 51 bp, Homo sapiens
tctcaagtacccaggataggctatgyatttcctcaacttatataaagattg

SEQ ID NO: 1697 - DNA, 51 bp, Homo sapiens
tggtcctggccttctgtttctgttcyatggcagctgacaccgcccagggga

SEQ ID NO: 1698 - DNA, 51 bp, Homo sapiens; identical to SEQ ID NO: 1258

SEQ ID NO: 1699 - DNA, 51 bp, Homo sapiens; identical to SEQ ID NO: 1356

SEQ ID NO: 1700 - DNA, 51 bp, Homo sapiens; identical to SEQ ID NO: 1059

SEQ ID NO: 1701 - DNA, 51 bp, Homo sapiens; identical to SEQ ID NO: 1358

SEQ ID NO: 1702 - DNA, 51 bp, Homo sapiens; identical to SEQ ID NO: 113

SEQ ID NO: 1703 - DNA, 51 bp, Homo sapiens
tgagattagcactttgtgaaaatcaraatgtcaaattcaactattggcaga

SEQ ID NO: 1704 - DNA, 51 bp, Homo sapiens
atgccctctatggagatatagaataygtgcagattcatgagaataaagaac

SEQ ID NO: 1705 - DNA, 51 bp, Homo sapiens
ggtgcaacctgcccacgtcccagcaygtctgccctgcacaattgaacgtgg

SEQ ID NO: 1706 - DNA, 51 bp, Homo sapiens; identical to SEQ ID NO: 1376

SEQ ID NO: 1707 - DNA, 51 bp, Homo sapiens; identical to SEQ ID NO: 1199

SEQ ID NO: 1708 - DNA, 51 bp, Homo sapiens; identical to SEQ ID NO: 383

SEQ ID NO: 1709 - DNA, 51 bp, Homo sapiens
tggtgtgagtgccagaagctgcctcygtggttgagtcaccatgtgcatctc

SEQ ID NO: 1710 - DNA, 51 bp, Homo sapiens; identical to SEQ ID NO: 986

SEQ ID NO: 1711 - DNA, 51 bp, Homo sapiens; identical to SEQ ID NO: 1244

SEQ ID NO: 1712 - DNA, 51 bp, Homo sapiens
catttttcaagtatcactagacattktttttccctgtaaaacatgccgtaa

SEQ ID NO: 1713 - DNA, 51 bp, Homo sapiens; identical to SEQ ID NO: 1375

SEQ ID NO: 1714 - DNA, 51 bp, Homo sapiens
gctgagcaactgacaaagcaaacgcmcatattaatcctacttaaggttcac

SEQ ID NO: 1715 - DNA, 51 bp, Homo sapiens; identical to SEQ ID NO: 719

SEQ ID NO: 1716 - DNA, 51 bp, Homo sapiens
tgactgatttcagtggaatatcttcrcaaccaatacatccttaggcagccc

SEQ ID NO: 1717 - DNA, 51 bp, Homo sapiens
ttaaggccatagtggcgcctgtaacrtttgaaacatgtctccaaaatgaat

SEQ ID NO: 1718 - DNA, 51 bp, Homo sapiens
ctcaggggcagggtttgtccaagctrtgttgccttcacagctgcctcctcc

SEQ ID NO: 1719 - DNA, 51 bp, Homo sapiens; identical to SEQ ID NO: 262

SEQ ID NO: 1720 - DNA, 51 bp, Homo sapiens; identical to SEQ ID NO: 1338

SEQ ID NO: 1721 - DNA, 51 bp, Homo sapiens
tggattccagtatcaccagaatatgygacttaatatttacttatgtatgct

SEQ ID NO: 1722 - DNA, 51 bp, Homo sapiens; identical to SEQ ID NO: 169

SEQ ID NO: 1723 - DNA, 51 bp, Homo sapiens; identical to SEQ ID NO: 1346

SEQ ID NO: 1724 - DNA, 51 bp, Homo sapiens; identical to SEQ ID NO: 308

SEQ ID NO: 1725 - DNA, 51 bp, Homo sapiens
cagatcttattgtggtaccatacttsagttatgtgatgagagtgaccaagg

SEQ ID NO: 1726 - DNA, 51 bp, Homo sapiens; identical to SEQ ID NO: 1046

SEQ ID NO: 1727 - DNA, 51 bp, Homo sapiens
gcatatggtttaggaggaaccaaaamacagatatatgggaggaagggaata

SEQ ID NO: 1728 - DNA, 51 bp, Homo sapiens; identical to SEQ ID NO: 1206

SEQ ID NO: 1729 - DNA, 51 bp, Homo sapiens
tcttggttttgccagaaccctggtaygtaaattctctcctacttggtgaaa

SEQ ID NO: 1730 - DNA, 51 bp, Homo sapiens
taagtttaaagtcatcacagttttcwaaatatccccaataatttacctgtt

SEQ ID NO: 1731 - DNA, 51 bp, Homo sapiens
tcccatgatttaaggatgccaaccamataaagaaactccaaattccacatc

SEQ ID NO: 1732 - DNA, 51 bp, Homo sapiens
gcagactgtgaaagaacgtcccacartcccaaagtcccagatcgaggggtc

SEQ ID NO: 1733 - DNA, 51 bp, Homo sapiens; identical to SEQ ID NO: 1302

SEQ ID NO: 1734 - DNA, 51 bp, Homo sapiens
gcctggcccacattcgtactcctcaratatatccctcttctcacaccaaga

SEQ ID NO: 1735 - DNA, 51 bp, Homo sapiens
tgatgtatgttagtactacttgagaygtctttcaaatgaacaaaataagac

SEQ ID NO: 1736 - DNA, 51 bp, Homo sapiens; identical to SEQ ID NO: 942

SEQ ID NO: 1737 - DNA, 51 bp, Homo sapiens
attatcattctcagatttgatccttrtaaattccatagctaagaccccttg

SEQ ID NO: 1738 - DNA, 51 bp, Homo sapiens
gtgtttgttcattctgggcaaatcawccattaacactcagaagacttttaa

SEQ ID NO: 1739 - DNA, 51 bp, Homo sapiens; identical to SEQ ID NO: 1288

SEQ ID NO: 1740 - DNA, 51 bp, Homo sapiens; identical to SEQ ID NO: 1328

SEQ ID NO: 1741 - DNA, 51 bp, Homo sapiens
ttccaaatcaccatcacttgcagtcrtaaagggttacagcaaagttactga

SEQ ID NO: 1742 - DNA, 51 bp, Homo sapiens
tatccctcaatagccctgggaacacrctactgagagccacattttggggat

SEQ ID NO: 1743 - DNA, 51 bp, Homo sapiens; identical to SEQ ID NO: 720

SEQ ID NO: 1744 - DNA, 51 bp, Homo sapiens
cctaaagagtttcctctgactccctrtatatttaaatctgttgaattcttg

SEQ ID NO: 1745 - DNA, 51 bp, Homo sapiens
ttatgccctgttatcagaactaattygccttaatctcttaaatccacagaa

SEQ ID NO: 1746 - DNA, 51 bp, Homo sapiens; identical to SEQ ID NO: 650

SEQ ID NO: 1747 - DNA, 51 bp, Homo sapiens; identical to SEQ ID NO: 1201

SEQ ID NO: 1748 - DNA, 51 bp, Homo sapiens; identical to SEQ ID NO: 444

SEQ ID NO: 1749 - DNA, 51 bp, Homo sapiens
gctagttaagaatgctctatttcttsttccattttgtaagtttaaacacag

SEQ ID NO: 1750 - DNA, 51 bp, Homo sapiens; identical to SEQ ID NO: 85

SEQ ID NO: 1751 - DNA, 51 bp, Homo sapiens
ttactgcttccttttcataagcaaarcatcatgtggctaagcagctctcta

SEQ ID NO: 1752 - DNA, 51 bp, Homo sapiens
tggggcacccaactatccctggcatscagaagtcagtcacagttagccatt

SEQ ID NO: 1753 - DNA, 51 bp, Homo sapiens
gtcaccttagaatagaaagcactgcmgtccacagagtgaagatcagcgtct

SEQ ID NO: 1754 - DNA, 51 bp, Homo sapiens; identical to SEQ ID NO: 752

SEQ ID NO: 1755 - DNA, 51 bp, Homo sapiens; identical to SEQ ID NO: 81

SEQ ID NO: 1756 - DNA, 51 bp, Homo sapiens
tccaccgggaggacagagcagctgcrtctctccatcactaatctccaacct

SEQ ID NO: 1757 - DNA, 51 bp, Homo sapiens
ccatctaggatgaagagagagtcctyggaaggtgtcatcaggtattgacca

SEQ ID NO: 1758 - DNA, 51 bp, Homo sapiens; identical to SEQ ID NO: 350

SEQ ID NO: 1759 - DNA, 51 bp, Homo sapiens; identical to SEQ ID NO: 1274

SEQ ID NO: 1760 - DNA, 51 bp, Homo sapiens
gatataaaacctagagaagtgcagargtaaaatttgattgctacttcagga

SEQ ID NO: 1761 - DNA, 51 bp, Homo sapiens
ggtccttcctgtagggagagttataygagtctgagaaaacatctggccagc

SEQ ID NO: 1762 - DNA, 51 bp, Homo sapiens; identical to SEQ ID NO: 261

SEQ ID NO: 1763 - DNA, 51 bp, Homo sapiens; identical to SEQ ID NO: 408

SEQ ID NO: 1764 - DNA, 51 bp, Homo sapiens
gctaactgatttattcttctcccagkctgttctcacagatactttcttcac

SEQ ID NO: 1765 - DNA, 51 bp, Homo sapiens
tacactggcaagttttatgtatcagkgctggtttctatctgaggaaataag

SEQ ID NO: 1766 - DNA, 51 bp, Homo sapiens; identical to SEQ ID NO: 354

SEQ ID NO: 1767 - DNA, 51 bp, Homo sapiens
ttcatagacagccacctctgaagacytgaggaaggttagaaatctgggcct

SEQ ID NO: 1768 - DNA, 51 bp, Homo sapiens
gtgggaaaatgatactatttaatttktacctgtggcttattggtaaccttt

SEQ ID NO: 1769 - DNA, 51 bp, Homo sapiens; identical to SEQ ID NO: 953

SEQ ID NO: 1770 - DNA, 51 bp, Homo sapiens; identical to SEQ ID NO: 37

SEQ ID NO: 1771 - DNA, 51 bp, Homo sapiens
cacaattaaaggagtaggctagttastgaggccaagagaatatgcttgctg

SEQ ID NO: 1772 - DNA, 51 bp, Homo sapiens
gcctaacgcggccctctgaatctctyagagaaattgcaaaccctggcctag

SEQ ID NO: 1773 - DNA, 51 bp, Homo sapiens; identical to SEQ ID NO: 128

SEQ ID NO: 1774 - DNA, 51 bp, Homo sapiens
tctgaataatatgattaggagatgaygctttacataatatttgataaatag

SEQ ID NO: 1775 - DNA, 51 bp, Homo sapiens
acacagaagagctccagattccaggycacagggaagcctacggccttggct

SEQ ID NO: 1776 - DNA, 51 bp, Homo sapiens
aaattgcatgtgccaacttaaaatgrggtagttgaccattccatcttttca

SEQ ID NO: 1777 - DNA, 51 bp, Homo sapiens
tatgagggactagagcatatctgtgygtccttccctactgaagattcagga

SEQ ID NO: 1778 - DNA, 51 bp, Homo sapiens; identical to SEQ ID NO: 312

SEQ ID NO: 1779 - DNA, 51 bp, Homo sapiens; identical to SEQ ID NO: 699

SEQ ID NO: 1780 - DNA, 51 bp, Homo sapiens
gcatactggatattaacaaacataaratttgcattataaaagcaagtgtca

SEQ ID NO: 1781 - DNA, 51 bp, Homo sapiens; identical to SEQ ID NO: 210

SEQ ID NO: 1782 - DNA, 51 bp, Homo sapiens; identical to SEQ ID NO: 1693

SEQ ID NO: 1783 - DNA, 51 bp, Homo sapiens
cccagaaggcccctcattccagtacstctctcaactgctttctcacaattc

SEQ ID NO: 1784 - DNA, 51 bp, Homo sapiens
caaataacacttgccagtgatttgaraaacgggaaaatacggtataggcag

SEQ ID NO: 1785 - DNA, 51 bp, Homo sapiens
tttgctacaaggagattatggcacarcatatggagtccttactctccaggg

SEQ ID NO: 1786 - DNA, 51 bp, Homo sapiens; identical to SEQ ID NO: 77

SEQ ID NO: 1787 - DNA, 51 bp, Homo sapiens; identical to SEQ ID NO: 220

SEQ ID NO: 1788 - DNA, 51 bp, Homo sapiens
tacaggtttttaactcactgagcatwtacctaaaggttttgacttccttcc

SEQ ID NO: 1789 - DNA, 51 bp, Homo sapiens
aaatttcctcaatgtgacaccctgcrtatcccctacctacatctctgggct

SEQ ID NO: 1790 - DNA, 51 bp, Homo sapiens
aaccctgtacccttcttccttgtggygctctcagaacccttatgcattaca

SEQ ID NO: 1791 - DNA, 51 bp, Homo sapiens
gctcccaagccgcccagccttccgaygcacagcattctagcaccagagcag

SEQ ID NO: 1792 - DNA, 51 bp, Homo sapiens; identical to SEQ ID NO: 527

SEQ ID NO: 1793 - DNA, 51 bp, Homo sapiens
gccagaaggccaagcctggggctgcrtgtgcactaatttttgtattttttt

SEQ ID NO: 1794 - DNA, 51 bp, Homo sapiens
gcttcggagatagtggaaattcctcyggaggataaaagaaaaccaaaggta

SEQ ID NO: 1795 - DNA, 51 bp, Homo sapiens
ttctgaacatacacccaggaatgtawtattgttccgtttttgcagaagcta

SEQ ID NO: 1796 - DNA, 51 bp, Homo sapiens
cagctgtggcagggtttcgctgtcayttgaaaagactaactagattttgac

SEQ ID NO: 1797 - DNA, 51 bp, Homo sapiens
tctcatgttaaagttcaaacgttctyaggagagatgatacacattgttatt

SEQ ID NO: 1798 - DNA, 51 bp, Homo sapiens
aggcggctactgggccggcctgaccraagccaaccggctacagcggcgccg

SEQ ID NO: 1799 - DNA, 51 bp, Homo sapiens
gagacagagtttttctctggagcaartttatttacattctctgagagtaaa

SEQ ID NO: 1800 - DNA, 51 bp, Homo sapiens; identical to SEQ ID NO: 1232

SEQ ID NO: 1801 - DNA, 51 bp, Homo sapiens; identical to SEQ ID NO: 1112

SEQ ID NO: 1802 - DNA, 51 bp, Homo sapiens
aaggccgggacaggcgtgaatattcygctatgtcactcagctcccgtggtt

SEQ ID NO: 1803 - DNA, 51 bp, Homo sapiens
aaatgctttctaaatgtgaagttttycctctcagattcaaagacttcttgc

SEQ ID NO: 1804 - DNA, 51 bp, Homo sapiens
aatctggaacaatctctcctcttttrcaaaggccaacggcaattcatcttc

SEQ ID NO: 1805 - DNA, 51 bp, Homo sapiens
tatcagccactgagtcaaacagctaygaagctctcacctgtcaacagtggg

SEQ ID NO: 1806 - DNA, 51 bp, Homo sapiens; identical to SEQ ID NO: 1118

SEQ ID NO: 1807 - DNA, 51 bp, Homo sapiens
aactctgggagattctcctattgacscagaaagcgattccttcactgatac

SEQ ID NO: 1808 - DNA, 51 bp, Homo sapiens
cataaatatgcattatgataacagayggtttagagattggaaataacacta

SEQ ID NO: 1809 - DNA, 51 bp, Homo sapiens
tttgtaagtttattaccaaatcccartgaagaaggcatgaacaaagaacaa

SEQ ID NO: 1810 - DNA, 51 bp, Homo sapiens
ggtttttttcagattcaggtttaggytgctattctttcatcaattttcctg

SEQ ID NO: 1811 - DNA, 51 bp, Homo sapiens; identical to SEQ ID NO: 887

SEQ ID NO: 1812 - DNA, 51 bp, Homo sapiens; identical to SEQ ID NO: 911

SEQ ID NO: 1813 - DNA, 51 bp, Homo sapiens
ccccaggtactttgcatgtctcacarcattacgaatggataactgaatctc

SEQ ID NO: 1814 - DNA, 51 bp, Homo sapiens
gtgcatttctagataggaattgcctktttatcttcaggaatatctcattag

SEQ ID NO: 1815 - DNA, 51 bp, Homo sapiens; identical to SEQ ID NO: 963

SEQ ID NO: 1816 - DNA, 51 bp, Homo sapiens
tacacagacactggcatgcttatgtytataggtatcacagatgataagaca

SEQ ID NO: 1817 - DNA, 51 bp, Homo sapiens
aaaccaaactgatctctctgggttgkcttcaggtaagagatacatacattt

SEQ ID NO: 1818 - DNA, 51 bp, Homo sapiens
ggcccacacttgggtaaatgctgtgsccatctttaaatattacatgatttt

SEQ ID NO: 1819 - DNA, 51 bp, Homo sapiens
tcaagaagagactgtttagctaataygaaagagactttagcatgccaacat

SEQ ID NO: 1820 - DNA, 51 bp, Homo sapiens; identical to SEQ ID NO: 1510

SEQ ID NO: 1821 - DNA, 51 bp, Homo sapiens
ctatttccagctccactgagtgcccmtgtgttttcagagaaaacaggagtc

SEQ ID NO: 1822 - DNA, 51 bp, Homo sapiens
cccatcttcttccaggaagatgtccwtttgcaaattggcatcattatcatg

SEQ ID NO: 1823 - DNA, 51 bp, Homo sapiens
cagctgtgagtcaaagatatttttayaattcataatcttatatatattttt

SEQ ID NO: 1824 - DNA, 51 bp, Homo sapiens; identical to SEQ ID NO: 370

SEQ ID NO: 1825 - DNA, 51 bp, Homo sapiens; identical to SEQ ID NO: 325

SEQ ID NO: 1826 - DNA, 51 bp, Homo sapiens
cagaatttctcgaaggaaaactccaygttgatgatgttccccatctgagac

SEQ ID NO: 1827 - DNA, 51 bp, Homo sapiens; identical to SEQ ID NO: 178

SEQ ID NO: 1828 - DNA, 51 bp, Homo sapiens; identical to SEQ ID NO: 1192

SEQ ID NO: 1829 - DNA, 51 bp, Homo sapiens
cgttgcctgtctcttctggaactctyaggacttaacttcatatcaaagcag

SEQ ID NO: 1830 - DNA, 51 bp, Homo sapiens
gtaacttaatgggaagcagctagacrttttaaaagagatggaggaaaaaca

SEQ ID NO: 1831 - DNA, 51 bp, Homo sapiens
tgactgggattttcactttttaaccmgtcatcattgcaaagacaaagagaa

SEQ ID NO: 1832 - DNA, 51 bp, Homo sapiens; identical to SEQ ID NO: 41

SEQ ID NO: 1833 - DNA, 51 bp, Homo sapiens; identical to SEQ ID NO: 1323

SEQ ID NO: 1834 - DNA, 51 bp, Homo sapiens
ggcataactggagaataaagtgatcytaaaatactgctgaaacaaaaagtc

SEQ ID NO: 1835 - DNA, 51 bp, Homo sapiens
tatttggtcgtaactttacaattatyacctcgacaaagggcatatctggtc

SEQ ID NO: 1836 - DNA, 51 bp, Homo sapiens
gtgggtccagaacatctgattgccamgggtggcctaaggatcctggcgggg

SEQ ID NO: 1837 - DNA, 51 bp, Homo sapiens; identical to SEQ ID NO: 1721

SEQ ID NO: 1838 - DNA, 51 bp, Homo sapiens
gctgtttccaaaacatggataatgaygaaaacctatgcaaacactcttgca

SEQ ID NO: 1839 - DNA, 51 bp, Homo sapiens
ctttttaattctgctttcatctgtcstggcactaattttgacccatatgtc

SEQ ID NO: 1840 - DNA, 51 bp, Homo sapiens
cacaagtgttctctcctcataatggyagcgtccggagcactcagcagtgag

SEQ ID NO: 1841 - DNA, 51 bp, Homo sapiens
tccatgtatattcagtgggtatagcmcctctttagccagggttcttacttt

SEQ ID NO: 1842 - DNA, 51 bp, Homo sapiens; identical to SEQ ID NO: 907

SEQ ID NO: 1843 - DNA, 51 bp, Homo sapiens
actggaaggaaatctattactgtaaratttgaccagtatgtacaagatgaa

SEQ ID NO: 1844 - DNA, 51 bp, Homo sapiens
tgaactttagcataattacagagacyagtgttattcagtggtgctccctga

SEQ ID NO: 1845 - DNA, 51 bp, Homo sapiens
gttaatcatttttcttatagctttgsggtagcttccaagatgagaacggga

SEQ ID NO: 1846 - DNA, 51 bp, Homo sapiens; identical to SEQ ID NO: 1225

SEQ ID NO: 1847 - DNA, 51 bp, Homo sapiens; identical to SEQ ID NO: 1473

SEQ ID NO: 1848 - DNA, 51 bp, Homo sapiens; identical to SEQ ID NO: 154

SEQ ID NO: 1849 - DNA, 51 bp, Homo sapiens
tattgttgttaaagtaattttagtgracttaagctatttatcagaatatct

SEQ ID NO: 1850 - DNA, 51 bp, Homo sapiens
ggctgggccagagaaacctgcaagcrtttaccaattaattggtgggcttct

SEQ ID NO: 1851 - DNA, 51 bp, Homo sapiens
ctctcgaagccttagtggtctcaacmataaataagattgttgggaagatgg

SEQ ID NO: 1852 - DNA, 51 bp, Homo sapiens; identical to SEQ ID NO: 867

SEQ ID NO: 1853 - DNA, 51 bp, Homo sapiens
cttttaggtaccctgggtctttggtsattagaaacagggagttggcaacaa

SEQ ID NO: 1854 - DNA, 51 bp, Homo sapiens
aatatttcgttagcaatgctctatcrtacctgtttgatgtatgtgtgtata

SEQ ID NO: 1855 - DNA, 51 bp, Homo sapiens
ttttggacctgttggtcttcagattyacactgaagttcttgggacttgtca

SEQ ID NO: 1856 - DNA, 51 bp, Homo sapiens
cgccacctgctggttctgtcagggtygctttggacaccttctcttccgtgt

SEQ ID NO: 1857 - DNA, 51 bp, Homo sapiens
ggaatccttctgatgtgtctgacgaktccgacaaaagcacgtcgggcaaga

SEQ ID NO: 1858 - DNA, 51 bp, Homo sapiens
cgcccggtcccctctcacagaccgcrtggggtgcaggcgactagagcctcc

SEQ ID NO: 1859 - DNA, 51 bp, Homo sapiens
gaaataaaatccatgtttcctttagrctcacaaaccaaacacgaggagcac

SEQ ID NO: 1860 - DNA, 51 bp, Homo sapiens
aatcctctgtgcattcattgtgtgcscttagataagctgtcttccttccct

SEQ ID NO: 1861 - DNA, 51 bp, Homo sapiens
ctaaatctcaattgagaattacagtractttttccaaataaattaggctag

SEQ ID NO: 1862 - DNA, 51 bp, Homo sapiens
gctagatcccaagtacctccaggatwgagccctaatcctgaccccaaacat

SEQ ID NO: 1863 - DNA, 51 bp, Homo sapiens
ccacctccttggggacccacataccragaattgcaccctgagcatcagaga

SEQ ID NO: 1864 - DNA, 51 bp, Homo sapiens
gtgatccagggagacccagaggaatkgggccgtttgttgtatggaaaggag

SEQ ID NO: 1865 - DNA, 51 bp, Homo sapiens
ataagggaaacactcaccagtacagyatcttcaggtaatttcctattttaa

SEQ ID NO: 1866 - DNA, 51 bp, Homo sapiens
agccaaatcatggaggtataaaagcrtgagctacattagcaagcatctaat

SEQ ID NO: 1867 - DNA, 51 bp, Homo sapiens; identical to SEQ ID NO: 727

SEQ ID NO: 1868 - DNA, 51 bp, Homo sapiens
gccatacagagcacactgaatagagytgtttttggatcacaccccagacat

SEQ ID NO: 1869 - DNA, 51 bp, Homo sapiens
agggtttatgtcatttactagagaarctaccacttcagggtctcaaagatt

SEQ ID NO: 1870 - DNA, 51 bp, Homo sapiens; identical to SEQ ID NO: 116

SEQ ID NO: 1871 - DNA, 51 bp, Homo sapiens; identical to SEQ ID NO: 1581

SEQ ID NO: 1872 - DNA, 51 bp, Homo sapiens
tgatcatacctgtattctaaacctgyctggcccataaagacctttttattt

SEQ ID NO: 1873 - DNA, 51 bp, Homo sapiens
ttactcacacttgtctcaaccacctrcaaaaaagtagaccttactaaagaa

SEQ ID NO: 1874 - DNA, 51 bp, Homo sapiens
ggattttagacatttagacttaagcrgcatcacagacttgggaagtaggtg

SEQ ID NO: 1875 - DNA, 51 bp, Homo sapiens
tcgacagttatgagagacctcaaagrttcacaacatgaagccctttgtaac

SEQ ID NO: 1876 - DNA, 51 bp, Homo sapiens
gtgtggtaaagcagaagtcatacatstgaactatgatagagctcagattcc

SEQ ID NO: 1877 - DNA, 51 bp, Homo sapiens; identical to SEQ ID NO: 809

SEQ ID NO: 1878 - DNA, 51 bp, Homo sapiens; identical to SEQ ID NO: 1018

SEQ ID NO: 1879 - DNA, 51 bp, Homo sapiens
gccacatcaggagtgactcagggggyggtcgggggagctggagccacagcc

SEQ ID NO: 1880 - DNA, 51 bp, Homo sapiens
actttccaagtatttcccaaccttayttgatgctgagaacatttggttagg

SEQ ID NO: 1881 - DNA, 51 bp, Homo sapiens; identical to SEQ ID NO: 1744

SEQ ID NO: 1882 - DNA, 51 bp, Homo sapiens
ttcaaaatgatagccaagcatgcaartgtttactttaatagtttttggggg

SEQ ID NO: 1883 - DNA, 51 bp, Homo sapiens
acttcaaagaacatatgttaaaccaygataggtaatttaagttgcactttc

SEQ ID NO: 1884 - DNA, 51 bp, Homo sapiens
atacagggaagccctctggccatctragtagcactctccagttaacatttc

SEQ ID NO: 1885 - DNA, 51 bp, Homo sapiens; identical to SEQ ID NO: 873

SEQ ID NO: 1886 - DNA, 51 bp, Homo sapiens; identical to SEQ ID NO: 1137

SEQ ID NO: 1887 - DNA, 51 bp, Homo sapiens; identical to SEQ ID NO: 184

SEQ ID NO: 1888 - DNA, 51 bp, Homo sapiens
cagcaagtgggacagcagaccttgtrctccttgctctaaacagtagagaat

SEQ ID NO: 1889 - DNA, 51 bp, Homo sapiens
ctgttgtcttgcttcacctttacatkattaatctgcagatgtgaaactgaa

SEQ ID NO: 1890 - DNA, 51 bp, Homo sapiens
atatggtccatgtgacatcccacccrtaactagtttatgccatagtgtatt

SEQ ID NO: 1891 - DNA, 51 bp, Homo sapiens; identical to SEQ ID NO: 838

SEQ ID NO: 1892 - DNA, 51 bp, Homo sapiens
gctgccgaaaggggccactccccagsatacctcggtgagtgagcaatggga

SEQ ID NO: 1893 - DNA, 51 bp, Homo sapiens; identical to SEQ ID NO: 518

SEQ ID NO: 1894 - DNA, 51 bp, Homo sapiens
gatgcaggcacctttggggaagtcarctacttcttcagtgatgaccctgac

SEQ ID NO: 1895 - DNA, 51 bp, Homo sapiens
ttcaattcatggcatgttatggagascatggattttatcaaaaagaaataa

SEQ ID NO: 1896 - DNA, 51 bp, Homo sapiens
tgaatcctggtccccagaattttttkccagaaaacacttcactttctccac

SEQ ID NO: 1897 - DNA, 51 bp, Homo sapiens; identical to SEQ ID NO: 1525

SEQ ID NO: 1898 - DNA, 51 bp, Homo sapiens
cagtaagtactctcacatgggtacayagtaaagtgctgagaagacataagg

SEQ ID NO: 1899 - DNA, 51 bp, Homo sapiens
ggaatttcttatagaataggactatkattatctcaccttgagaaaagataa

SEQ ID NO: 1900 - DNA, 51 bp, Homo sapiens
taaggttttaatgtttaaataaactrctgcccaatcaataatctacaaaat

SEQ ID NO: 1901 - DNA, 51 bp, Homo sapiens
ttcaaaataaggggatttctgaggcytcttccagatctaacatagtatgtt

SEQ ID NO: 1902 - DNA, 51 bp, Homo sapiens
gttgacttgtcaaaaagtaactcacygtaaggcagtttcttaaacttatct

SEQ ID NO: 1903 - DNA, 51 bp, Homo sapiens; identical to SEQ ID NO: 815

SEQ ID NO: 1904 - DNA, 51 bp, Homo sapiens
tccaactccaggatcagacatagaakaacaggctaggaaaagagagatttc

SEQ ID NO: 1905 - DNA, 51 bp, Homo sapiens
caatgaatcctctctttggaattagsctttagatttctagtcattgtttct

SEQ ID NO: 1906 - DNA, 51 bp, Homo sapiens
tttctttaacttggtatctggtatgkaataagtgtacgatacgttacttcc

SEQ ID NO: 1907 - DNA, 51 bp, Homo sapiens
tactgagacagtttttgaaccagctrgattctccactgttaaagaataaat

SEQ ID NO: 1908 - DNA, 51 bp, Homo sapiens; identical to SEQ ID NO: 217

SEQ ID NO: 1909 - DNA, 51 bp, Homo sapiens
ttcttattcttacccattgctcccaytgagatgacctcaagcaattctgaa

SEQ ID NO: 1910 - DNA, 51 bp, Homo sapiens; identical to SEQ ID NO: 976

SEQ ID NO: 1911 - DNA, 51 bp, Homo sapiens
tgcagccaagttcttagggttccgtmagcgctgcatccccaggagcctctg

SEQ ID NO: 1912 - DNA, 51 bp, Homo sapiens; identical to SEQ ID NO: 394

SEQ ID NO: 1913 - DNA, 51 bp, Homo sapiens
cagtcaaatactgcttattccatttyttggcatgtgtaagcattcatacat

SEQ ID NO: 1914 - DNA, 51 bp, Homo sapiens
agaccaaaacagtaactctacgagtytgcaagaagcacagcattactgggg

SEQ ID NO: 1915 - DNA, 51 bp, Homo sapiens; identical to SEQ ID NO: 87

SEQ ID NO: 1916 - DNA, 51 bp, Homo sapiens; identical to SEQ ID NO: 563

SEQ ID NO: 1917 - DNA, 51 bp, Homo sapiens
aaaacatcatcactaagatcttcagrggtcagtttctgaaggacctttctt

SEQ ID NO: 1918 - DNA, 51 bp, Homo sapiens; identical to SEQ ID NO: 1189

SEQ ID NO: 1919 - DNA, 51 bp, Homo sapiens; identical to SEQ ID NO: 1255

SEQ ID NO: 1920 - DNA, 51 bp, Homo sapiens; identical to SEQ ID NO: 1176

SEQ ID NO: 1921 - DNA, 51 bp, Homo sapiens; identical to SEQ ID NO: 158

SEQ ID NO: 1922 - DNA, 51 bp, Homo sapiens; identical to SEQ ID NO: 1761

SEQ ID NO: 1923 - DNA, 51 bp, Homo sapiens
tatataatcaaattcttatatgtttstatgcacacatccattcacgttagt

SEQ ID NO: 1924 - DNA, 51 bp, Homo sapiens
cctctgctaaaggtcctcgcaagcaygtcatcttcagttgcatctactcaa

SEQ ID NO: 1925 - DNA, 51 bp, Homo sapiens
aaagacggaggtcatgttagagagaytgtgaaaagtaaaaatgtgtcaaag

SEQ ID NO: 1926 - DNA, 51 bp, Homo sapiens; identical to SEQ ID NO: 1365

SEQ ID NO: 1927 - DNA, 51 bp, Homo sapiens
attaatgaaaagagaatccaagctgrcagtgagatctgtaggatcctgagg

SEQ ID NO: 1928 - DNA, 51 bp, Homo sapiens
agaatccctaaaagggaagataccartagagaggaataagttgaaagttaa

SEQ ID NO: 1929 - DNA, 51 bp, Homo sapiens
tttcattttcttctggactggtaatwtttacttctggccttggtggtcttt

SEQ ID NO: 1930 - DNA, 51 bp, Homo sapiens
tagctactgctcttattgaggttgtstttctctactcctctgtaacatcgt

SEQ ID NO: 1931 - DNA, 51 bp, Homo sapiens
gtgataagtgattagaaagcactccraagaccacactgatagataagtgaa

SEQ ID NO: 1932 - DNA, 51 bp, Homo sapiens; identical to SEQ ID NO: 245

SEQ ID NO: 1933 - DNA, 51 bp, Homo sapiens
agctgggctgataacagacatttatrgacagtagcaataggaccctttttg

SEQ ID NO: 1934 - DNA, 51 bp, Homo sapiens
ctgccttgggtgcacctgagggatgmagctgaattcacctgcagagctcag

SEQ ID NO: 1935 - DNA, 51 bp, Homo sapiens
gctctttgtacttagtgacagaaacracattgcgatgtgaaggttactctg

SEQ ID NO: 1936 - DNA, 51 bp, Homo sapiens; identical to SEQ ID NO: 1461

SEQ ID NO: 1937 - DNA, 51 bp, Homo sapiens; identical to SEQ ID NO: 845

SEQ ID NO: 1938 - DNA, 51 bp, Homo sapiens
cattccatctctctgctcaaatgatraagtcccaattccttagcctaacat

SEQ ID NO: 1939 - DNA, 51 bp, Homo sapiens
ttgccggccctttgtgtctgatgccrtatctgccttctgctgagccatggc

SEQ ID NO: 1940 - DNA, 51 bp, Homo sapiens
tggagagatagtgtaaagatcacatwaaaagggcctagtaactaattagat

SEQ ID NO: 1941 - DNA, 51 bp, Homo sapiens; identical to SEQ ID NO: 257

SEQ ID NO: 1942 - DNA, 51 bp, Homo sapiens
aaagaaaggttttacccatcttgaawctggctgcgctagatctcccctgga

SEQ ID NO: 1943 - DNA, 51 bp, Homo sapiens; identical to SEQ ID NO: 149

SEQ ID NO: 1944 - DNA, 51 bp, Homo sapiens
aacaaaaccccaagatccccataaartcctgataatcagaagccaggcatg

SEQ ID NO: 1945 - DNA, 51 bp, Homo sapiens
ataaattgtttagatttgtctctggycatccatgctaataagcttcctgtg

SEQ ID NO: 1946 - DNA, 51 bp, Homo sapiens
atgcaaaggagtaggggagatgagaytagaggtgaaagaatgcagggtctt

SEQ ID NO: 1947 - DNA, 51 bp, Homo sapiens
gaggctctgagaggctggtgggctcyagagtagaactgccggtccctgagc

SEQ ID NO: 1948 - DNA, 51 bp, Homo sapiens; identical to SEQ ID NO: 441

SEQ ID NO: 1949 - DNA, 51 bp, Homo sapiens; identical to SEQ ID NO: 1528

SEQ ID NO: 1950 - DNA, 51 bp, Homo sapiens
gggcacagattcaggacttgtctccrggacaatattagcagaattagaccc

SEQ ID NO: 1951 - DNA, 51 bp, Homo sapiens
tgtcttggtaattagcatcttgattktgtgattatttgtctgtagcagaga

SEQ ID NO: 1952 - DNA, 51 bp, Homo sapiens
tagtttttgtgaactgagtaggtagraaaaaaattgagagtctaaatttaa

SEQ ID NO: 1953 - DNA, 51 bp, Homo sapiens; identical to SEQ ID NO: 629

SEQ ID NO: 1954 - DNA, 51 bp, Homo sapiens; identical to SEQ ID NO: 1273

SEQ ID NO: 1955 - DNA, 51 bp, Homo sapiens
agcacaatcctccaattgcctaaacrgaacctggtttacccctacatcccc

SEQ ID NO: 1956 - DNA, 51 bp, Homo sapiens
ctcgtagctgtgggcgccctcactcyggctcaccgcacccatcagcatcag

SEQ ID NO: 1957 - DNA, 51 bp, Homo sapiens; identical to SEQ ID NO: 1215

SEQ ID NO: 1958 - DNA, 51 bp, Homo sapiens; identical to SEQ ID NO: 1265

SEQ ID NO: 1959 - DNA, 51 bp, Homo sapiens; identical to SEQ ID NO: 567

SEQ ID NO: 1960 - DNA, 51 bp, Homo sapiens; identical to SEQ ID NO: 1293

SEQ ID NO: 1961 - DNA, 51 bp, Homo sapiens; identical to SEQ ID NO: 1021

SEQ ID NO: 1962 - DNA, 51 bp, Homo sapiens
tttttaatattttatcagcatctttrcagttcaagtggatgaaaacagaag

SEQ ID NO: 1963 - DNA, 51 bp, Homo sapiens
ggaaacaaccccattggcacaaaatrcagtccaggtactgaatcaaagtgc

SEQ ID NO: 1964 - DNA, 51 bp, Homo sapiens
tttcatttgatcttcctccacctcaytgtttattctaggaagcttaacctt

SEQ ID NO: 1965 - DNA, 51 bp, Homo sapiens
accaatcgtcttccaacactgattaytgcagtcttaaaactccatattcag

SEQ ID NO: 1966 - DNA, 51 bp, Homo sapiens
atgaacaaggatctctgtgctgactwccggggtgtctgcccagagatggag

SEQ ID NO: 1967 - DNA, 51 bp, Homo sapiens
ccaccagaaacagagggagtctgacyaatccatgaggaagcggcaagcggg

SEQ ID NO: 1968 - DNA, 51 bp, Homo sapiens
cctcctgacttcccactaatcaagtrcactagccctcctggatataagctg

SEQ ID NO: 1969 - DNA, 51 bp, Homo sapiens
ctctcaggtgcaactcacatggagaygtggctctcaggtaaaagatacaac

SEQ ID NO: 1970 - DNA, 51 bp, Homo sapiens
atagcaggacttagaggatcaatgakaacttttcatcaaactttctcacct

SEQ ID NO: 1971 - DNA, 51 bp, Homo sapiens; identical to SEQ ID NO: 595

SEQ ID NO: 1972 - DNA, 51 bp, Homo sapiens
catttcgtaagaaaaaaacaaatggyagtgcggccagcatgtccaggccac

SEQ ID NO: 1973 - DNA, 51 bp, Homo sapiens; identical to SEQ ID NO: 206

SEQ ID NO: 1974 - DNA, 51 bp, Homo sapiens
gtttggtttataataaaagtgtcttwgcaaatcatgaggataagatgtttt

SEQ ID NO: 1975 - DNA, 51 bp, Homo sapiens; identical to SEQ ID NO: 1675

SEQ ID NO: 1976 - DNA, 51 bp, Homo sapiens; identical to SEQ ID NO: 594

SEQ ID NO: 1977 - DNA, 51 bp, Homo sapiens
agaatatgttctgaagtcttttcctkttgaataccatccagaatttttaaa

SEQ ID NO: 1978 - DNA, 51 bp, Homo sapiens
gctcacaccagaggcagcaagagacsttggccttctccctgggattgcggt

SEQ ID NO: 1979 - DNA, 51 bp, Homo sapiens
cttctgaagctataagcaaaattacrtgtgcaagtatgtatagcgtcctgg

SEQ ID NO: 1980 - DNA, 51 bp, Homo sapiens
caaaaattgagtaggtatatggtgayggacatagatctccttttccttctg

SEQ ID NO: 1981 - DNA, 51 bp, Homo sapiens
tgccgtaggaagggactggccctggrtctattttgttacactaatcatcat

SEQ ID NO: 1982 - DNA, 51 bp, Homo sapiens; identical to SEQ ID NO: 756

SEQ ID NO: 1983 - DNA, 51 bp, Homo sapiens; identical to SEQ ID NO: 359

SEQ ID NO: 1984 - DNA, 51 bp, Homo sapiens; identical to SEQ ID NO: 1732

SEQ ID NO: 1985 - DNA, 51 bp, Homo sapiens; identical to SEQ ID NO: 920

SEQ ID NO: 1986 - DNA, 51 bp, Homo sapiens
agccaggtggaagctgccgtcatggyagtgcctcgtactgcagaccaggac

SEQ ID NO: 1987 - DNA, 51 bp, Homo sapiens
tgctaatattttctatagtttcattsaaacaaagtgctagtagtgaagcca

SEQ ID NO: 1988 - DNA, 51 bp, Homo sapiens
tgaatgaatttgaaaaagacacaacrctttcagacatattctatgagggtc

SEQ ID NO: 1989 - DNA, 51 bp, Homo sapiens; identical to SEQ ID NO: 500

SEQ ID NO: 1990 - DNA, 51 bp, Homo sapiens
gatgctactctagggacacatgttgyagaaataggcaattctcattcatag

SEQ ID NO: 1991 - DNA, 51 bp, Homo sapiens
ctgtaaaataaggaaattttgtggcytacttgaaataaatagcagctttat

SEQ ID NO: 1992 - DNA, 51 bp, Homo sapiens
taaactaccatatttattttaaataraattgacacttccttgttacaataa

SEQ ID NO: 1993 - DNA, 51 bp, Homo sapiens
actagccttggaggagatgtagaggygaaggcttggaatacagacaaatac

SEQ ID NO: 1994 - DNA, 51 bp, Homo sapiens; identical to SEQ ID NO: 106

SEQ ID NO: 1995 - DNA, 51 bp, Homo sapiens
gcagtaccatggcgtacttgcaccargatatgcaattctgtatttttaaag

SEQ ID NO: 1996 - DNA, 51 bp, Homo sapiens
tggaactgatgtgctggccatgcagmggaataggcaggacctgtcatttac

SEQ ID NO: 1997 - DNA, 51 bp, Homo sapiens
tgctccgcgggggaagcccgtcagcygggtccctcaactcaaaggtctgtg

SEQ ID NO: 1998 - DNA, 51 bp, Homo sapiens
tctctctagtttatcattaccagttmaagatccagttcatcaaccaaactg

SEQ ID NO: 1999 - DNA, 51 bp, Homo sapiens; identical to SEQ ID NO: 646

SEQ ID NO: 2000 - DNA, 51 bp, Homo sapiens
gcttgacttcaaattaaaatcagctytttcctttatttcttttgtaagcct

SEQ ID NO: 2001 - DNA, 51 bp, Homo sapiens
gagtttttgaaactgtatgctatgtrctgggaggaaggtggggaaaatcct

SEQ ID NO: 2002 - DNA, 51 bp, Homo sapiens
gactagcaggtaagttcattgcttayaagtttgtgacttttacaaacccta

SEQ ID NO: 2003 - DNA, 51 bp, Homo sapiens; identical to SEQ ID NO: 894

SEQ ID NO: 2004 - DNA, 51 bp, Homo sapiens
ttgctccgtgaggtgattatgtccartatggcctccttgtcactgcctgga

SEQ ID NO: 2005 - DNA, 51 bp, Homo sapiens
ggagctatgtgacattcttaactcaktttgaacttgagaaaaacaaaattc

SEQ ID NO: 2006 - DNA, 51 bp, Homo sapiens
tgacatatggttcaacaaaggctcgmagaccggggcatccagtacttgtgg

SEQ ID NO: 2007 - DNA, 51 bp, Homo sapiens
cttatttcctttctgcatttggcagstccggccaggtgtccagggaatgga

SEQ ID NO: 2008 - DNA, 51 bp, Homo sapiens; identical to SEQ ID NO: 1872

SEQ ID NO: 2009 - DNA, 51 bp, Homo sapiens
aggtgaccagggatgcttttttaggsaagaaaatgtaaatgtgggtacaga

SEQ ID NO: 2010 - DNA, 51 bp, Homo sapiens; identical to SEQ ID NO: 512

SEQ ID NO: 2011 - DNA, 51 bp, Homo sapiens
atttcttgcttactcaagttttaggygttacgaaaatactatttttttcta

SEQ ID NO: 2012 - DNA, 51 bp, Homo sapiens
acctacctctagaccagggactgggygtacttctcatatatcagaaggtgt

SEQ ID NO: 2013 - DNA, 51 bp, Homo sapiens
tacttaacctattgtaaatttgtttsaattgtatattcttaccttagaaac

SEQ ID NO: 2014 - DNA, 51 bp, Homo sapiens; identical to SEQ ID NO: 1791

SEQ ID NO: 2015 - DNA, 51 bp, Homo sapiens; identical to SEQ ID NO: 354

SEQ ID NO: 2016 - DNA, 51 bp, Homo sapiens
aaatcgaggatgacccaaagattttsacattgagataatagtggtcctaaa

SEQ ID NO: 2017 - DNA, 51 bp, Homo sapiens; identical to SEQ ID NO: 312

SEQ ID NO: 2018 - DNA, 51 bp, Homo sapiens; identical to SEQ ID NO: 1851

SEQ ID NO: 2019 - DNA, 51 bp, Homo sapiens; identical to SEQ ID NO: 1793

SEQ ID NO: 2020 - DNA, 51 bp, Homo sapiens
attgggctgcaggctctatggggttygttatgccaaagtgtctacatgtgc

SEQ ID NO: 2021 - DNA, 51 bp, Homo sapiens; identical to SEQ ID NO: 149

SEQ ID NO: 2022 - DNA, 51 bp, Homo sapiens; identical to SEQ ID NO: 887

SEQ ID NO: 2023 - DNA, 51 bp, Homo sapiens; identical to SEQ ID NO: 1816

SEQ ID NO: 2024 - DNA, 51 bp, Homo sapiens
acttaagaccaggagtgatattccamatagtcaataacaagtaggacaggg

SEQ ID NO: 2025 - DNA, 51 bp, Homo sapiens; identical to SEQ ID NO: 1063

SEQ ID NO: 2026 - DNA, 51 bp, Homo sapiens
tttacacatcagtgcatttttgtatytagcacaattcctggcatgtggctg

SEQ ID NO: 2027 - DNA, 51 bp, Homo sapiens
ataaaaaggaatgaaatacagatacrtgctacaaacctggatgaacctgga

SEQ ID NO: 2028 - DNA, 51 bp, Homo sapiens; identical to SEQ ID NO: 1845

SEQ ID NO: 2029 - DNA, 51 bp, Homo sapiens; identical to SEQ ID NO: 1883

SEQ ID NO: 2030 - DNA, 51 bp, Homo sapiens; identical to SEQ ID NO: 1884

SEQ ID NO: 2031 - DNA, 51 bp, Homo sapiens; identical to SEQ ID NO: 1821

SEQ ID NO: 2032 - DNA, 51 bp, Homo sapiens; identical to SEQ ID NO: 675

SEQ ID NO: 2033 - DNA, 51 bp, Homo sapiens
cagaatctaggcaaatcagtgactgkttcctcccatagcataaactcttgg

SEQ ID NO: 2034 - DNA, 51 bp, Homo sapiens; identical to SEQ ID NO: 1783

SEQ ID NO: 2035 - DNA, 51 bp, Homo sapiens; identical to SEQ ID NO: 1906

SEQ ID NO: 2036 - DNA, 51 bp, Homo sapiens; identical to SEQ ID NO: 1993

SEQ ID NO: 2037 - DNA, 51 bp, Homo sapiens; identical to SEQ ID NO: 1225

SEQ ID NO: 2038 - DNA, 51 bp, Homo sapiens; identical to SEQ ID NO: 1128

SEQ ID NO: 2039 - DNA, 51 bp, Homo sapiens; identical to SEQ ID NO: 527

SEQ ID NO: 2040 - DNA, 51 bp, Homo sapiens; identical to SEQ ID NO: 1829

SEQ ID NO: 2041 - DNA, 51 bp, Homo sapiens; identical to SEQ ID NO: 1850

SEQ ID NO: 2042 - DNA, 51 bp, Homo sapiens
tgcacttattacttattcagaaaaasaatttaaaacaatttcaaactagaa

SEQ ID NO: 2043 - DNA, 51 bp, Homo sapiens; identical to SEQ ID NO: 1777

SEQ ID NO: 2044 - DNA, 51 bp, Homo sapiens
aagagttaaggctttggggtgcaacrgaacagggttcaaatctacctcttt

SEQ ID NO: 2045 - DNA, 51 bp, Homo sapiens; identical to SEQ ID NO: 1244

SEQ ID NO: 2046 - DNA, 51 bp, Homo sapiens
atagggttgcaagatgaaggctaaawcacaccactcaagagagtcaaacag

SEQ ID NO: 2047 - DNA, 51 bp, Homo sapiens; identical to SEQ ID NO: 154

SEQ ID NO: 2048 - DNA, 51 bp, Homo sapiens
ttatgctctcacacttccctctcttktcagtttaatgtgccaagactctct

SEQ ID NO: 2049 - DNA, 51 bp, Homo sapiens; identical to SEQ ID NO: 210

SEQ ID NO: 2050 - DNA, 51 bp, Homo sapiens
cagcaatagccttttgctgctgaggytggctccacagcatgtctgtcctgc

SEQ ID NO: 2051 - DNA, 51 bp, Homo sapiens; identical to SEQ ID NO: 267

SEQ ID NO: 2052 - DNA, 51 bp, Homo sapiens; identical to SEQ ID NO: 1774

SEQ ID NO: 2053 - DNA, 51 bp, Homo sapiens; identical to SEQ ID NO: 645

SEQ ID NO: 2054 - DNA, 51 bp, Homo sapiens
cagtgtatagaatagacacaaaactkagtcaatcatcattccctcctttgt

SEQ ID NO: 2055 - DNA, 51 bp, Homo sapiens
tatgacctctgcagtcttattttctwttcacaaaagtgaggcttattacct

SEQ ID NO: 2056 - DNA, 51 bp, Homo sapiens
ctcctgctcctatgagaattgaaccrtgctgctgatctcacaggaggtggg

SEQ ID NO: 2057 - DNA, 51 bp, Homo sapiens; identical to SEQ ID NO: 1189

SEQ ID NO: 2058 - DNA, 51 bp, Homo sapiens
tgacttctttattctggagaaggaasagtccagagtaacagtcatagacct

SEQ ID NO: 2059 - DNA, 51 bp, Homo sapiens; identical to SEQ ID NO: 1925

SEQ ID NO: 2060 - DNA, 51 bp, Homo sapiens; identical to SEQ ID NO: 1613

SEQ ID NO: 2061 - DNA, 51 bp, Homo sapiens
taaatcccttttcattttggcatagkttatatcttaagtttcttactccag

SEQ ID NO: 2062 - DNA, 51 bp, Homo sapiens
gagaccgaacagatcccaggtgtcasaattttcctttctatgtctaccata

SEQ ID NO: 2063 - DNA, 51 bp, Homo sapiens
cctaaaatgagaattaagttgacatwgccagtgtgagtccgtatctgtgaa

SEQ ID NO: 2064 - DNA, 51 bp, Homo sapiens
tcgagtccacagctgcacggagccaygggtccaaaacgaattctccactga

SEQ ID NO: 2065 - DNA, 51 bp, Homo sapiens
atggaaacaaaggcccccagtgcagrgaagccagcgtggtgaggggtgaac

SEQ ID NO: 2066 - DNA, 51 bp, Homo sapiens
ttagaaacgtggagatgtccttttcycatgggtagcagacacataacttct

SEQ ID NO: 2067 - DNA, 51 bp, Homo sapiens; identical to SEQ ID NO: 1092

SEQ ID NO: 2068 - DNA, 51 bp, Homo sapiens; identical to SEQ ID NO: 220

SEQ ID NO: 2069 - DNA, 51 bp, Homo sapiens; identical to SEQ ID NO: 1215

SEQ ID NO: 2070 - DNA, 51 bp, Homo sapiens
ttaatggagccttctttgaaatcttrtagttctgctgcatgttaattggcc

SEQ ID NO: 2071 - DNA, 51 bp, Homo sapiens; identical to SEQ ID NO: 518

SEQ ID NO: 2072 - DNA, 51 bp, Homo sapiens
aagtaccatgtaaactgatagatgaygttaaggttctcaaggtggtgacta

SEQ ID NO: 2073 - DNA, 51 bp, Homo sapiens
gggggatattgatgtctacctgctasgagttttggtaggcttcaagaagct

SEQ ID NO: 2074 - DNA, 51 bp, Homo sapiens; identical to SEQ ID NO: 1138

SEQ ID NO: 2075 - DNA, 51 bp, Homo sapiens
gttcatcagaacagacaccatggcaragcatgattaccatgaagactatgg

SEQ ID NO: 2076 - DNA, 51 bp, Homo sapiens
gtagtgttttctcaaccaaaaattgrgacatgcgatctgccaaaaataagt

SEQ ID NO: 2077 - DNA, 51 bp, Homo sapiens; identical to SEQ ID NO: 1813

SEQ ID NO: 2078 - DNA, 51 bp, Homo sapiens
tgctttctctaagctctctagggccygttaggattggggagtttctgggaa

SEQ ID NO: 2079 - DNA, 51 bp, Homo sapiens; identical to SEQ ID NO: 1814

SEQ ID NO: 2080 - DNA, 51 bp, Homo sapiens; identical to SEQ ID NO: 1939

SEQ ID NO: 2081 - DNA, 51 bp, Homo sapiens
tttattcatttatttcagcagcattrtgtcttagaggtattgcaggataac

SEQ ID NO: 2082 - DNA, 51 bp, Homo sapiens
acccatgtactcgccggcttggatcwgcaccgcctctttcttgactagtag

SEQ ID NO: 2083 - DNA, 51 bp, Homo sapiens
gctctctgttaccagggtttagagtyagggcaatgccaaattatgtcagac

SEQ ID NO: 2084 - DNA, 51 bp, Homo sapiens
tatttcatcccgtctgctcagggaargctaaatatctgtcctgttcctatt

SEQ ID NO: 2085 - DNA, 51 bp, Homo sapiens; identical to SEQ ID NO: 615

SEQ ID NO: 2086 - DNA, 51 bp, Homo sapiens
acatggctagcacattgcttggcacrttctcagaggtgaataggtcatttt

SEQ ID NO: 2087 - DNA, 51 bp, Homo sapiens; identical to SEQ ID NO: 1399

SEQ ID NO: 2088 - DNA, 51 bp, Homo sapiens
agtatccgggcacccagggcgagggyggaaggaaggaaaggaagagttgat

SEQ ID NO: 2089 - DNA, 51 bp, Homo sapiens
ttttcttaatttatctgtgtttactrtaaagcaaagtgtgttttgtacctt

SEQ ID NO: 2090 - DNA, 51 bp, Homo sapiens; identical to SEQ ID NO: 1156

SEQ ID NO: 2091 - DNA, 51 bp, Homo sapiens; identical to SEQ ID NO: 1780

SEQ ID NO: 2092 - DNA, 51 bp, Homo sapiens
acttttccacagaataccaagtaacmagtttggctgatttaaagaacagat

SEQ ID NO: 2093 - DNA, 51 bp, Homo sapiens; identical to SEQ ID NO: 1977

SEQ ID NO: 2094 - DNA, 51 bp, Homo sapiens
gaaattagggatgctcagggttgaayagcctgggtctgtcatggagagaat

SEQ ID NO: 2095 - DNA, 51 bp, Homo sapiens; identical to SEQ ID NO: 865

SEQ ID NO: 2096 - DNA, 51 bp, Homo sapiens
ggtttctgtgatattggaaaaaacartgcatcataaaatccagggcctcag

SEQ ID NO: 2097 - DNA, 51 bp, Homo sapiens
cacactgcagcctcgcgggctgccckggacttcatcaagcccgggtcggct

SEQ ID NO: 2098 - DNA, 51 bp, Homo sapiens
accctccaatcaagctgtagttatcrctaacttgtttgttaaggtcaccaa

SEQ ID NO: 2099 - DNA, 51 bp, Homo sapiens
atcaagcatactcacatactaccggraaagatctatgttaggagaaaaagc

SEQ ID NO: 2100 - DNA, 51 bp, Homo sapiens
ggtcccggtatcattgtcagacacastgtcattgtccaggagggggaccca

SEQ ID NO: 2101 - DNA, 51 bp, Homo sapiens
tataaggatccacttaagttaaaacractgcatatttacaacagtccttct

SEQ ID NO: 2102 - DNA, 51 bp, Homo sapiens; identical to SEQ ID NO: 1118

SEQ ID NO: 2103 - DNA, 51 bp, Homo sapiens; identical to SEQ ID NO: 77

SEQ ID NO: 2104 - DNA, 51 bp, Homo sapiens
gaacaaaagaagtcaatcaagggcaycagtgacaatattaacacccagaat

SEQ ID NO: 2105 - DNA, 51 bp, Homo sapiens; identical to SEQ ID NO: 1868

SEQ ID NO: 2106 - DNA, 51 bp, Homo sapiens
tcgaaattttatcagctgtctcaatkatgttcttttttgatttgttttatt

SEQ ID NO: 2107 - DNA, 51 bp, Homo sapiens
taagatgcactccacgcattcaaccrttgaaccctcattgcagccaccaga

SEQ ID NO: 2108 - DNA, 51 bp, Homo sapiens
ctaccccaaagttgcagcattaaatyatggcttccgtatctcagcagccat

SEQ ID NO: 2109 - DNA, 51 bp, Homo sapiens; identical to SEQ ID NO: 67

SEQ ID NO: 2110 - DNA, 51 bp, Homo sapiens
ttttactaatgtactcaagttcataygatgatttaattcaggatttgacaa

SEQ ID NO: 2111 - DNA, 51 bp, Homo sapiens; identical to SEQ ID NO: 1737

SEQ ID NO: 2112 - DNA, 51 bp, Homo sapiens; identical to SEQ ID NO: 1223

SEQ ID NO: 2113 - DNA, 51 bp, Homo sapiens; identical to SEQ ID NO: 1892

SEQ ID NO: 2114 - DNA, 51 bp, Homo sapiens; identical to SEQ ID NO: 465

SEQ ID NO: 2115 - DNA, 51 bp, Homo sapiens
accaaacaaaaggtggaagggttgtytgtttcacccctggaccctgtctgt

SEQ ID NO: 2116 - DNA, 51 bp, Homo sapiens
acagatttaagctagtacacacgacrgtacaagccttttctttttaaatgg

SEQ ID NO: 2117 - DNA, 51 bp, Homo sapiens
catccagcctccttttacctggccaytccgttctctctcctggccctgtgt

SEQ ID NO: 2118 - DNA, 51 bp, Homo sapiens; identical to SEQ ID NO: 1963

SEQ ID NO: 2119 - DNA, 51 bp, Homo sapiens; identical to SEQ ID NO: 60

SEQ ID NO: 2120 - DNA, 51 bp, Homo sapiens
cttgacatgtcctactccttcttgayggatgaagttttaggcctagtgttg

SEQ ID NO: 2121 - DNA, 51 bp, Homo sapiens; identical to SEQ ID NO: 953

SEQ ID NO: 2122 - DNA, 51 bp, Homo sapiens
ttctaagaaattaatcccaaagaaaytgccttttattattagctcctcata

SEQ ID NO: 2123 - DNA, 51 bp, Homo sapiens
ctgccacatcctagcctttgggaccyaaaacaagtcactcaatctctttaa

SEQ ID NO: 2124 - DNA, 51 bp, Homo sapiens
tcacagtgtccctgtgtgatgctctyttttgacccacacactgtataggtc

SEQ ID NO: 2125 - DNA, 51 bp, Homo sapiens
atatttgtaaactgcttggcacagcrcctggaccacagaaaatatgcaacc

SEQ ID NO: 2126 - DNA, 51 bp, Homo sapiens; identical to SEQ ID NO: 212

SEQ ID NO: 2127 - DNA, 51 bp, Homo sapiens; identical to SEQ ID NO: 1621

SEQ ID NO: 2128 - DNA, 51 bp, Homo sapiens; identical to SEQ ID NO: 1933

SEQ ID NO: 2129 - DNA, 51 bp, Homo sapiens
tacatcatggggaagtggaaatggcrcaaattctggaggaagtcgaagagg

SEQ ID NO: 2130 - DNA, 51 bp, Homo sapiens
caatccatcttcttgtgtactgttcragtatatttctaaccatgtgactcc

SEQ ID NO: 2131 - DNA, 51 bp, Homo sapiens; identical to SEQ ID NO: 1771

SEQ ID NO: 2132 - DNA, 51 bp, Homo sapiens; identical to SEQ ID NO: 640

SEQ ID NO: 2133 - DNA, 51 bp, Homo sapiens; identical to SEQ ID NO: 1242

SEQ ID NO: 2134 - DNA, 51 bp, Homo sapiens; identical to SEQ ID NO: 1966

SEQ ID NO: 2135 - DNA, 51 bp, Homo sapiens
agcagaagagttggtatctaatggamcctcaaacatgtgtactgcatgaat

SEQ ID NO: 2136 - DNA, 51 bp, Homo sapiens; identical to SEQ ID NO: 1888

SEQ ID NO: 2137 - DNA, 51 bp, Homo sapiens; identical to SEQ ID NO: 209

SEQ ID NO: 2138 - DNA, 51 bp, Homo sapiens; identical to SEQ ID NO: 64

SEQ ID NO: 2139 - DNA, 51 bp, Homo sapiens; identical to SEQ ID NO: 1459

SEQ ID NO: 2140 - DNA, 51 bp, Homo sapiens
cccacgtgtttataaaatgttttgtmatatccttaatcataatatctttaa

SEQ ID NO: 2141 - DNA, 51 bp, Homo sapiens; identical to SEQ ID NO: 1962

SEQ ID NO: 2142 - DNA, 51 bp, Homo sapiens
aggttctgcgggaactccttcttcakggagccctgcaggaggtggcggtcg

SEQ ID NO: 2143 - DNA, 51 bp, Homo sapiens; identical to SEQ ID NO: 1896

SEQ ID NO: 2144 - DNA, 51 bp, Homo sapiens; identical to SEQ ID NO: 197

SEQ ID NO: 2145 - DNA, 51 bp, Homo sapiens
cctttttctccaaaagtacattttcraggccttaggtgaaatatacactgc

SEQ ID NO: 2146 - DNA, 51 bp, Homo sapiens
ttatcatttcttcattttgggaacaytcgatagtctcctagctactgaaaa

SEQ ID NO: 2147 - DNA, 51 bp, Homo sapiens
ctaggagacagagtactgtcttgtaytaaaatttgatattcactctgtgta

SEQ ID NO: 2148 - DNA, 51 bp, Homo sapiens
tcttgtctcacagatcaggtggtaargcactaagaaccttgatttagataa

SEQ ID NO: 2149 - DNA, 51 bp, Homo sapiens; identical to SEQ ID NO: 1855

SEQ ID NO: 2150 - DNA, 51 bp, Homo sapiens; identical to SEQ ID NO: 1006

SEQ ID NO: 2151 - DNA, 51 bp, Homo sapiens; identical to SEQ ID NO: 1794

SEQ ID NO: 2152 - DNA, 51 bp, Homo sapiens; identical to SEQ ID NO: 473

SEQ ID NO: 2153 - DNA, 51 bp, Homo sapiens
catcctggagctgctgctgctggctraggacatcgggctgctcaacagcac

SEQ ID NO: 2154 - DNA, 51 bp, Homo sapiens
ctgcctttgtgaagtctcttccacargaaaaatctcctgcactgaacctca

SEQ ID NO: 2155 - DNA, 51 bp, Homo sapiens; identical to SEQ ID NO: 74

SEQ ID NO: 2156 - DNA, 51 bp, Homo sapiens; identical to SEQ ID NO: 1895

SEQ ID NO: 2157 - DNA, 51 bp, Homo sapiens
gtcccccagaccatctgtattgccaygctctatgtcctgctcaaaagtcag

SEQ ID NO: 2158 - DNA, 51 bp, Homo sapiens
tttatagattagtattctcaaagtarcatcttcctgaaccggaaccccact

SEQ ID NO: 2159 - DNA, 51 bp, Homo sapiens; identical to SEQ ID NO: 1854

SEQ ID NO: 2160 - DNA, 51 bp, Homo sapiens; identical to SEQ ID NO: 1988

SEQ ID NO: 2161 - DNA, 51 bp, Homo sapiens; identical to SEQ ID NO: 1789

SEQ ID NO: 2162 - DNA, 51 bp, Homo sapiens; identical to SEQ ID NO: 19

SEQ ID NO: 2163 - DNA, 51 bp, Homo sapiens; identical to SEQ ID NO: 230

SEQ ID NO: 2164 - DNA, 51 bp, Homo sapiens
acgtcagatggtacggaggaaaacaytttacactttaacagtatttttacg

SEQ ID NO: 2165 - DNA, 51 bp, Homo sapiens; identical to SEQ ID NO: 1765

SEQ ID NO: 2166 - DNA, 51 bp, Homo sapiens; identical to SEQ ID NO: 1844

SEQ ID NO: 2167 - DNA, 51 bp, Homo sapiens
ttttttttaactctaaacatgttacrtggaaaggcaagtacctaatttgaa

SEQ ID NO: 2168 - DNA, 51 bp, Homo sapiens
tatttttatttatctcggtcttgacrgtctgaattactgtggcctccatgt

SEQ ID NO: 2169 - DNA, 51 bp, Homo sapiens
tgctcttctgtatttagacctgctgrtttcctagccagaagtgggtgtttg

SEQ ID NO: 2170 - DNA, 51 bp, Homo sapiens
atcaatatcacaaaagacttgctatraactgtgctaacttgggtatttttc

SEQ ID NO: 2171 - DNA, 51 bp, Homo sapiens
tggatattcctatcaacattcaaagkttcaaacaaaatctaggatgtttca

SEQ ID NO: 2172 - DNA, 51 bp, Homo sapiens; identical to SEQ ID NO: 1796

SEQ ID NO: 2173 - DNA, 51 bp, Homo sapiens
actccaaatggccaacaatttgcacraggttaacagaagaatcaggcattt

SEQ ID NO: 2174 - DNA, 51 bp, Homo sapiens; identical to SEQ ID NO: 1775

SEQ ID NO: 2175 - DNA, 51 bp, Homo sapiens
atttgtatgggatattttctagtggwcatctgttaaatttaacattttgat

SEQ ID NO: 2176 - DNA, 51 bp, Homo sapiens
cttccctactgcctaataattgttayaattgcctcagatgggcgagggcca

SEQ ID NO: 2177 - DNA, 51 bp, Homo sapiens
tcaaagtttgaaaccaaagccaaaasgggctgcctcatttgatcagaccaa

SEQ ID NO: 2178 - DNA, 51 bp, Homo sapiens
tcttttcctcttcagaatgcttttgygggttccatttaacaatggggagtg

SEQ ID NO: 2179 - DNA, 51 bp, Homo sapiens
ctgtgtgcccttcctgagtggtgaakgaggggcagcatgtctaatggagag

SEQ ID NO: 2180 - DNA, 51 bp, Homo sapiens; identical to SEQ ID NO: 1033

SEQ ID NO: 2181 - DNA, 51 bp, Homo sapiens; identical to SEQ ID NO: 874

SEQ ID NO: 2182 - DNA, 51 bp, Homo sapiens
ggccaggctgacaaattatcagtacrgttctcacactcaccccctccactc

SEQ ID NO: 2183 - DNA, 51 bp, Homo sapiens
ttttaagaaccgagtatttccagtgyaatgttaaaggtagcctactgctgt

SEQ ID NO: 2184 - DNA, 51 bp, Homo sapiens
aataatatacatctgtttgttaatamaaagtgcaaaggctgaaagttttgt

SEQ ID NO: 2185 - DNA, 51 bp, Homo sapiens
aagatacactggacggtgcttctccrggtacctgtgcccgagggagatacc

SEQ ID NO: 2186 - DNA, 51 bp, Homo sapiens
cacatcactgtggagcctgccatccrttttaataacccactgcatgcacat

SEQ ID NO: 2187 - DNA, 51 bp, Homo sapiens; identical to SEQ ID NO: 297

SEQ ID NO: 2188 - DNA, 51 bp, Homo sapiens
aattagctcggcactggccgaaacastccctaacagccctagccccacagt

SEQ ID NO: 2189 - DNA, 51 bp, Homo sapiens; identical to SEQ ID NO: 1094

SEQ ID NO: 2190 - DNA, 51 bp, Homo sapiens
atgccaataattcaagtgtttctatycagttcaatctacttagaattgcaa

SEQ ID NO: 2191 - DNA, 51 bp, Homo sapiens
tccttccccctacacctttactaaayggcaagaacaggtagtggtttccca

SEQ ID NO: 2192 - DNA, 51 bp, Homo sapiens; identical to SEQ ID NO: 325

SEQ ID NO: 2193 - DNA, 51 bp, Homo sapiens
aatagatcaatagacaatagattaawgcctgccggggagtaattagaagaa

SEQ ID NO: 2194 - DNA, 51 bp, Homo sapiens
acccctatgaatttgcttaatggatygattctttaaaatgaggtgctacat

SEQ ID NO: 2195 - DNA, 51 bp, Homo sapiens; identical to SEQ ID NO: 223

SEQ ID NO: 2196 - DNA, 51 bp, Homo sapiens
acaggaattcatggagggctaatctytcccttacaggtacttcgaatttca

SEQ ID NO: 2197 - DNA, 51 bp, Homo sapiens
ttcatttgatatgagcacattttatyttagtgggcactgcacactttcgga

SEQ ID NO: 2198 - DNA, 51 bp, Homo sapiens
tcaaagtgaacttaaaaataggacastttcaacaagtcaggagattcacag

SEQ ID NO: 2199 - DNA, 51 bp, Homo sapiens
ggccttcatggtgtgtagattgagtygtggctaaactggagcatttacttg

SEQ ID NO: 2200 - DNA, 51 bp, Homo sapiens
tctcaccaagttttctggggaagaascactatgactctcctccactgtgta

SEQ ID NO: 2201 - DNA, 51 bp, Homo sapiens; identical to SEQ ID NO: 1343

SEQ ID NO: 2202 - DNA, 51 bp, Homo sapiens; identical to SEQ ID NO: 758

SEQ ID NO: 2203 - DNA, 51 bp, Homo sapiens; identical to SEQ ID NO: 1838

SEQ ID NO: 2204 - DNA, 51 bp, Homo sapiens
cagaaaactgtggactactgtaagtsagctataacgtgaattacaaatatt

SEQ ID NO: 2205 - DNA, 51 bp, Homo sapiens
gtcatttaatggtgaacctttgtatkcagtttgaacgtaaatttgtgtttc

SEQ ID NO: 2206 - DNA, 51 bp, Homo sapiens; identical to SEQ ID NO: 1523

SEQ ID NO: 2207 - DNA, 51 bp, Homo sapiens; identical to SEQ ID NO: 606

SEQ ID NO: 2208 - DNA, 51 bp, Homo sapiens
cctttcaggttctggagctatgcccrgaggatgagataacgcccacgggga

SEQ ID NO: 2209 - DNA, 51 bp, Homo sapiens
ctttggctcgcggcctctgggcaagmtgactacactgcaacgcaaagtctg

SEQ ID NO: 2210 - DNA, 51 bp, Homo sapiens
aatcaaacaggcatttcaatcataaytgtgctggtatcctgttacttggtt

SEQ ID NO: 2211 - DNA, 51 bp, Homo sapiens; identical to SEQ ID NO: 1803

SEQ ID NO: 2212 - DNA, 51 bp, Homo sapiens
tatagctcttcaattaacacacgtgyggaaatatcttccctgtttccagtg

SEQ ID NO: 2213 - DNA, 51 bp, Homo sapiens; identical to SEQ ID NO: 1913

SEQ ID NO: 2214 - DNA, 51 bp, Homo sapiens; identical to SEQ ID NO: 1929

SEQ ID NO: 2215 - DNA, 51 bp, Homo sapiens; identical to SEQ ID NO: 1998

SEQ ID NO: 2216 - DNA, 51 bp, Homo sapiens
ccattaagacaggttcctcactgtaytgcttattctctttccagtcttttt

SEQ ID NO: 2217 - DNA, 51 bp, Homo sapiens; identical to SEQ ID NO: 886

SEQ ID NO: 2218 - DNA, 51 bp, Homo sapiens; identical to SEQ ID NO: 1648

SEQ ID NO: 2219 - DNA, 51 bp, Homo sapiens
tgacgtctcactaaggcttctaattkccattatacttctatttaccaaagt

SEQ ID NO: 2220 - DNA, 51 bp, Homo sapiens; identical to SEQ ID NO: 1798

SEQ ID NO: 2221 - DNA, 51 bp, Homo sapiens; identical to SEQ ID NO: 1978

SEQ ID NO: 2222 - DNA, 51 bp, Homo sapiens; identical to SEQ ID NO: 547

SEQ ID NO: 2223 - DNA, 51 bp, Homo sapiens; identical to SEQ ID NO: 1874

SEQ ID NO: 2224 - DNA, 51 bp, Homo sapiens
cctctgaacgtccaaattctttcttstaatttcagccaactgaagggcctt

SEQ ID NO: 2225 - DNA, 51 bp, Homo sapiens
gaaatgtctaacaatatgcaggaagrggtaatgccttttccccaccttctc

SEQ ID NO: 2226 - DNA, 51 bp, Homo sapiens; identical to SEQ ID NO: 257

SEQ ID NO: 2227 - DNA, 51 bp, Homo sapiens
ctttcaggtggtagaatttccttgcrccttgaacatctttgtagtacgtaa

SEQ ID NO: 2228 - DNA, 51 bp, Homo sapiens; identical to SEQ ID NO: 534

SEQ ID NO: 2229 - DNA, 51 bp, Homo sapiens; identical to SEQ ID NO: 1232

SEQ ID NO: 2230 - DNA, 51 bp, Homo sapiens
tttgagtgtaattcaggagactttcrcccagttaacatatttaatgcataa

SEQ ID NO: 2231 - DNA, 51 bp, Homo sapiens; identical to SEQ ID NO: 1580

SEQ ID NO: 2232 - DNA, 51 bp, Homo sapiens; identical to SEQ ID NO: 25

SEQ ID NO: 2233 - DNA, 51 bp, Homo sapiens
tctgatcagcacactttgaacattayggcccagctcactccaactggaatg

SEQ ID NO: 2234 - DNA, 51 bp, Homo sapiens
tcccaccgaaatgttgtcaacgtccrcatcttcgtctctgagtactggttc

SEQ ID NO: 2235 - DNA, 51 bp, Homo sapiens; identical to SEQ ID NO: 135

SEQ ID NO: 2236 - DNA, 51 bp, Homo sapiens
gtgcattttgagtctcagaacggagycttccttatccccaagttcttacag

SEQ ID NO: 2237 - DNA, 51 bp, Homo sapiens; identical to SEQ ID NO: 2000

SEQ ID NO: 2238 - DNA, 51 bp, Homo sapiens
catgaagaaaattatagcttggcatyacattaaatacaaatgtcttttgat

SEQ ID NO: 2239 - DNA, 51 bp, Homo sapiens; identical to SEQ ID NO: 1638

SEQ ID NO: 2240 - DNA, 51 bp, Homo sapiens; identical to SEQ ID NO: 1836

SEQ ID NO: 2241 - DNA, 51 bp, Homo sapiens; identical to SEQ ID NO: 500

SEQ ID NO: 2242 - DNA, 51 bp, Homo sapiens; identical to SEQ ID NO: 1018

SEQ ID NO: 2243 - DNA, 51 bp, Homo sapiens
tattactaagggaccttggacgtcgrcatgtctatgttactatcagcatga

SEQ ID NO: 2244 - DNA, 51 bp, Homo sapiens; identical to SEQ ID NO: 1176

SEQ ID NO: 2245 - DNA, 51 bp, Homo sapiens
aggtgtacactgtggtccaaggcccyggatttggctcagagcttcataaat

SEQ ID NO: 2246 - DNA, 51 bp, Homo sapiens
tgctttgatcaatcacttaatcagcmaaggtctcatggtcactcttttctg

SEQ ID NO: 2247 - DNA, 51 bp, Homo sapiens; identical to SEQ ID NO: 256

SEQ ID NO: 2248 - DNA, 51 bp, Homo sapiens; identical to SEQ ID NO: 89

SEQ ID NO: 2249 - DNA, 51 bp, Homo sapiens; identical to SEQ ID NO: 1835

SEQ ID NO: 2250 - DNA, 51 bp, Homo sapiens
agtctatgaaactcgacagtgtgtawggcattagaaattacatgatttggc

SEQ ID NO: 2251 - DNA, 51 bp, Homo sapiens; identical to SEQ ID NO: 1236

SEQ ID NO: 2252 - DNA, 51 bp, Homo sapiens
gaagtttattttctgtctttggatayaaacaacaacattcaaagaatctat

SEQ ID NO: 2253 - DNA, 51 bp, Homo sapiens
gatttccagccatttggggccattcyagtggcagccttttcatcatttagt

SEQ ID NO: 2254 - DNA, 51 bp, Homo sapiens; identical to SEQ ID NO: 629

SEQ ID NO: 2255 - DNA, 51 bp, Homo sapiens
aagttgatagaaacgctgtgagctcracacaactcctttttgcctcaaacc

SEQ ID NO: 2256 - DNA, 51 bp, Homo sapiens; identical to SEQ ID NO: 335

SEQ ID NO: 2257 - DNA, 51 bp, Homo sapiens
acttttaaaaagtgacggggcctccrgaatttggggacgctcttcctctgg

SEQ ID NO: 2258 - DNA, 51 bp, Homo sapiens; identical to SEQ ID NO: 783

SEQ ID NO: 2259 - DNA, 51 bp, Homo sapiens
tttgctgatgttataaatcatggaakgttgactgactgtgctgcagctata

SEQ ID NO: 2260 - DNA, 51 bp, Homo sapiens
gcctccttaacgtggtgtattccagkgtgtggtatactgatggtgtacaag

SEQ ID NO: 2261 - DNA, 51 bp, Homo sapiens; identical to SEQ ID NO: 382

SEQ ID NO: 2262 - DNA, 51 bp, Homo sapiens
aatattttcccaaagacttgattagytgttcatttgtagttaaaatgacac

SEQ ID NO: 2263 - DNA, 51 bp, Homo sapiens; identical to SEQ ID NO: 653

SEQ ID NO: 2264 - DNA, 51 bp, Homo sapiens
attagtacctttggaatttgtgataytgggtttattataatgcacatatgt

SEQ ID NO: 2265 - DNA, 51 bp, Homo sapiens; identical to SEQ ID NO: 1790

SEQ ID NO: 2266 - DNA, 51 bp, Homo sapiens; identical to SEQ ID NO: 441

SEQ ID NO: 2267 - DNA, 51 bp, Homo sapiens; identical to SEQ ID NO: 1972

SEQ ID NO: 2268 - DNA, 51 bp, Homo sapiens
ataactcaatatttacaagctttatwtacagaaaatccaagataaattact

SEQ ID NO: 2269 - DNA, 51 bp, Homo sapiens
gatacgtgcttgcattgaaatatgcrggcttccattggttattagtcactg

SEQ ID NO: 2270 - DNA, 51 bp, Homo sapiens
ccggcgacagtgacttccttgccaargtagccctttgagcagcgcacttga

SEQ ID NO: 2271 - DNA, 51 bp, Homo sapiens
tagaactcctcatgttgccactcacsgacatccttggggtccatcatccag

SEQ ID NO: 2272 - DNA, 51 bp, Homo sapiens
tcctcacacgtcttcctgaggtcccsgctgagctccgcccagtcaagtccg

SEQ ID NO: 2273 - DNA, 51 bp, Homo sapiens
gaagattctccttgaagctttatcaytaaaaaataaacccacatattctgt

SEQ ID NO: 2274 - DNA, 51 bp, Homo sapiens; identical to SEQ ID NO: 326

SEQ ID NO: 2275 - DNA, 51 bp, Homo sapiens; identical to SEQ ID NO: 842

SEQ ID NO: 2276 - DNA, 51 bp, Homo sapiens; identical to SEQ ID NO: 757

SEQ ID NO: 2277 - DNA, 51 bp, Homo sapiens
agagaaacactgtccttggggtagayggtgtgggcagcagtgaggatccat

SEQ ID NO: 2278 - DNA, 51 bp, Homo sapiens; identical to SEQ ID NO: 1106

SEQ ID NO: 2279 - DNA, 51 bp, Homo sapiens
catctcacatggttttcgcctctctrtgtctgtatgtctgaaattcccctc

SEQ ID NO: 2280 - DNA, 51 bp, Homo sapiens; identical to SEQ ID NO: 646

SEQ ID NO: 2281 - DNA, 51 bp, Homo sapiens; identical to SEQ ID NO: 1260

SEQ ID NO: 2282 - DNA, 51 bp, Homo sapiens; identical to SEQ ID NO: 217

SEQ ID NO: 2283 - DNA, 51 bp, Homo sapiens
ggaagaggaagtgtcagatgaagtcratggggcagaggtccctaaccccga

SEQ ID NO: 2284 - DNA, 51 bp, Homo sapiens; identical to SEQ ID NO: 1059

SEQ ID NO: 2285 - DNA, 51 bp, Homo sapiens; identical to SEQ ID NO: 1807

SEQ ID NO: 2286 - DNA, 51 bp, Homo sapiens
ccttgacctactgctcctgcagacayggaagggatgactgaacacgacttt

SEQ ID NO: 2287 - DNA, 51 bp, Homo sapiens
tgaatggcactcttagccatgcagayagactacacaatgcttaattctgtg

SEQ ID NO: 2288 - DNA, 51 bp, Homo sapiens; identical to SEQ ID NO: 1044

SEQ ID NO: 2289 - DNA, 51 bp, Homo sapiens
acagccttattaactaactcatcccrcagttttcaaagagcatgtatttct

SEQ ID NO: 2290 - DNA, 51 bp, Homo sapiens
tgggcatattttcctttttgctgccyggtctgagggataaggtgggttaag

SEQ ID NO: 2291 - DNA, 51 bp, Homo sapiens
cattcctttctgctatcttgaggttsaatttcctggtctccacgttttttt

SEQ ID NO: 2292 - DNA, 51 bp, Homo sapiens; identical to SEQ ID NO: 147

SEQ ID NO: 2293 - DNA, 51 bp, Homo sapiens
agccagttcctggaaggtcttgttcrcctggagtcaggtggggagccaggg

SEQ ID NO: 2294 - DNA, 51 bp, Homo sapiens; identical to SEQ ID NO: 594

SEQ ID NO: 2295 - DNA, 51 bp, Homo sapiens; identical to SEQ ID NO: 1856

SEQ ID NO: 2296 - DNA, 51 bp, Homo sapiens; identical to SEQ ID NO: 920

SEQ ID NO: 2297 - DNA, 51 bp, Homo sapiens; identical to SEQ ID NO: 330

SEQ ID NO: 2298 - DNA, 51 bp, Homo sapiens
tgtaggaagctctcccgagttctctscacagtccccttagtaagcgggatt

SEQ ID NO: 2299 - DNA, 51 bp, Homo sapiens
actttagccagtagctcatcagaagrtattacacttcccaactggtgcatt

SEQ ID NO: 2300 - DNA, 51 bp, Homo sapiens
taatgagctgcccttcatcccccctrgggcctcggaggagctgatgccact

SEQ ID NO: 2301 - DNA, 51 bp, Homo sapiens
cagaaaggtgtgccagtgaaacagarcacagctgtaaattccagctccaga

SEQ ID NO: 2302 - DNA, 51 bp, Homo sapiens
gaagttgcattctttctgcttctccrtgtgtgtcttgcagtgctcaactga

SEQ ID NO: 2303 - DNA, 51 bp, Homo sapiens; identical to SEQ ID NO: 98

SEQ ID NO: 2304 - DNA, 51 bp, Homo sapiens; identical to SEQ ID NO: 622

SEQ ID NO: 2305 - DNA, 51 bp, Homo sapiens
agtgtggttttgcctgttgggaaacwcttcagtcacacttttccaaaagtc

SEQ ID NO: 2306 - DNA, 51 bp, Homo sapiens; identical to SEQ ID NO: 1968

SEQ ID NO: 2307 - DNA, 51 bp, Homo sapiens; identical to SEQ ID NO: 504

SEQ ID NO: 2308 - DNA, 51 bp, Homo sapiens
ttttaaattacatctgtaagtaatayttgtggctccctcacactttgattg

SEQ ID NO: 2309 - DNA, 51 bp, Homo sapiens
gttttcatcagttttgtggtcatacrtttctgatatgcttcattaattgtt

SEQ ID NO: 2310 - DNA, 51 bp, Homo sapiens
acctaggctgctgaacactaatggayagggcagaatgatgtcaccacaaca

SEQ ID NO: 2311 - DNA, 51 bp, Homo sapiens
ctctggtcagattctatcaaagacarcccataggtatacaaatgaattgcg

SEQ ID NO: 2312 - DNA, 51 bp, Homo sapiens
aataataaaggacaaagtcatatatrtgccacccaggtgatgtaataattt

SEQ ID NO: 2313 - DNA, 51 bp, Homo sapiens
gctctcctgcctgccagctgcatgtyctatgacaagtcgtctaaccttccc

SEQ ID NO: 2314 - DNA, 51 bp, Homo sapiens
atttctttttaaatcactcctcatcygtagcttttgtgttagtgtccgatt

SEQ ID NO: 2315 - DNA, 51 bp, Homo sapiens
ttctagctgtctagtatcaataggcrtttttccagaacacacagtatatgt

SEQ ID NO: 2316 - DNA, 51 bp, Homo sapiens
gcaaatgtgacaaatggaggtttttrgtggcaaaacataggtacgggcaag

SEQ ID NO: 2317 - DNA, 51 bp, Homo sapiens
cagcttggattattttcccctgtcaktttagcaatcaacagcaataaaaac

SEQ ID NO: 2318 - DNA, 51 bp, Homo sapiens
tggtgaaaggttcatttcaacccttratgggaacatcgtgattctgtttaa

SEQ ID NO: 2319 - DNA, 51 bp, Homo sapiens
cttctatctcggcaggagctttgcartgaatatcgaaagcttgtgaggaac

SEQ ID NO: 2320 - DNA, 51 bp, Homo sapiens; identical to SEQ ID NO: 185

SEQ ID NO: 2321 - DNA, 51 bp, Homo sapiens
ttgattcctgggtgctttttaggcaycactaacgtaaagcatttgggaaat

SEQ ID NO: 2322 - DNA, 51 bp, Homo sapiens
ggatggtttctgcagagcttgacatwcctctctctaagatagctggggtcc

SEQ ID NO: 2323 - DNA, 51 bp, Homo sapiens; identical to SEQ ID NO: 1909

SEQ ID NO: 2324 - DNA, 51 bp, Homo sapiens; identical to SEQ ID NO: 705

SEQ ID NO: 2325 - DNA, 51 bp, Homo sapiens; identical to SEQ ID NO: 1950

SEQ ID NO: 2326 - DNA, 51 bp, Homo sapiens
ccctgggcagttcacattcaggatgktgtggccggtagggccatggttgca

SEQ ID NO: 2327 - DNA, 51 bp, Homo sapiens; identical to SEQ ID NO: 37

SEQ ID NO: 2328 - DNA, 51 bp, Homo sapiens; identical to SEQ ID NO: 859

SEQ ID NO: 2329 - DNA, 51 bp, Homo sapiens
aaggatgttttgtgaatgacagaaaytgctattttatcatggctgccttag

SEQ ID NO: 2330 - DNA, 51 bp, Homo sapiens
agagaacgtgcgatactaggagataygtgaaccctggatccaattctcctg

SEQ ID NO: 2331 - DNA, 51 bp, Homo sapiens
acatttgctgaattacaaagtagtgyagctgtacatcaaggccaaaagcta

SEQ ID NO: 2332 - DNA, 51 bp, Homo sapiens
ttcatgttgtttgtagtagcagagartgaaaataagtctcagagaagctgc

SEQ ID NO: 2333 - DNA, 51 bp, Homo sapiens; identical to SEQ ID NO: 1131

SEQ ID NO: 2334 - DNA, 51 bp, Homo sapiens; identical to SEQ ID NO: 1348

SEQ ID NO: 2335 - DNA, 51 bp, Homo sapiens
tggctagaaccaattttttttatcarcactgttttttattatatttcctaa

SEQ ID NO: 2336 - DNA, 51 bp, Homo sapiens
agctgctccatgttggcgtccaggayggccagggccacctgcaggatcacc

SEQ ID NO: 2337 - DNA, 51 bp, Homo sapiens; identical to SEQ ID NO: 29

SEQ ID NO: 2338 - DNA, 51 bp, Homo sapiens
cgccttcaaggtcaagttctttggtragaaggtcctagctgcattgcaaac

SEQ ID NO: 2339 - DNA, 51 bp, Homo sapiens; identical to SEQ ID NO: 63

SEQ ID NO: 2340 - DNA, 51 bp, Homo sapiens
atcatcaaccctgagattatcactcragatgtgagtacaaagcccccctca

SEQ ID NO: 2341 - DNA, 51 bp, Homo sapiens
ggcttcaggatgtccatgttggaacraagtactcgctctgctgcagccagt

SEQ ID NO: 2342 - DNA, 51 bp, Homo sapiens
tgattggcagagcagctccgagtccrtccagagcttcctgcagtcaatgat

SEQ ID NO: 2343 - DNA, 51 bp, Homo sapiens; identical to SEQ ID NO: 65

SEQ ID NO: 2344 - DNA, 51 bp, Homo sapiens; identical to SEQ ID NO: 2233

SEQ ID NO: 2345 - DNA, 51 bp, Homo sapiens; identical to SEQ ID NO: 253

SEQ ID NO: 2346 - DNA, 51 bp, Homo sapiens; identical to SEQ ID NO: 52

SEQ ID NO: 2347 - DNA, 51 bp, Homo sapiens; identical to SEQ ID NO: 187

SEQ ID NO: 2348 - DNA, 51 bp, Homo sapiens
aggctcttccctgcgcagtacaaggyttccctagtagtttggtttgcccaa

SEQ ID NO: 2349 - DNA, 51 bp, Homo sapiens; identical to SEQ ID NO: 27

SEQ ID NO: 2350 - DNA, 51 bp, Homo sapiens; identical to SEQ ID NO: 891

SEQ ID NO: 2351 - DNA, 51 bp, Homo sapiens
ctgttacctgacctgggctgtaaagsaaaggaggccgaggtgttcaccggt

SEQ ID NO: 2352 - DNA, 51 bp, Homo sapiens
aaataccctgagcatctggctctgayacatatgccaagaaaactctctcca

SEQ ID NO: 2353 - DNA, 51 bp, Homo sapiens
gagtgtaagggacaccaaggaggttwtaatggacttaaccaatgtttgaaa

SEQ ID NO: 2354 - DNA, 51 bp, Homo sapiens; identical to SEQ ID NO: 321

SEQ ID NO: 2355 - DNA, 51 bp, Homo sapiens
ttaactagcttggttgctgaacaccrggttaggctctcaaattaccctctg

SEQ ID NO: 2356 - DNA, 51 bp, Homo sapiens
agatttaaaaagatggatgcttattrgtctaactgggtttctatctggcca

SEQ ID NO: 2357 - DNA, 51 bp, Homo sapiens; identical to SEQ ID NO: 792

SEQ ID NO: 2358 - DNA, 51 bp, Homo sapiens
accccccgaagttttccagaacccaytttctccattctccttctgtgggct

SEQ ID NO: 2359 - DNA, 51 bp, Homo sapiens
cttgatttgagtgcagctaaaggcaktttacctatgctctctgcagaagga

SEQ ID NO: 2360 - DNA, 51 bp, Homo sapiens; identical to SEQ ID NO: 95

SEQ ID NO: 2361 - DNA, 51 bp, Homo sapiens
acaaaaagcaattgaggtccaggagstgccgcccacccggctcctcctctg

SEQ ID NO: 2362 - DNA, 51 bp, Homo sapiens
tcttacccatattgtccactcctcgygggatgatcacatcggcatacttct

SEQ ID NO: 2363 - DNA, 51 bp, Homo sapiens
attccttaatgcagatgctaagagayggcagagttgatcttttatcatctc

SEQ ID NO: 2364 - DNA, 51 bp, Homo sapiens; identical to SEQ ID NO: 298

SEQ ID NO: 2365 - DNA, 51 bp, Homo sapiens
accctccctgactttaaacctgaggkcagcctttccaaatcagtgcgcctc

SEQ ID NO: 2366 - DNA, 51 bp, Homo sapiens; identical to SEQ ID NO: 1242

SEQ ID NO: 2367 - DNA, 51 bp, Homo sapiens
atcaatgtctacaattcggtgtggtyacaagagcatgtgtacattgttgag

SEQ ID NO: 2368 - DNA, 51 bp, Homo sapiens
tattgctcctaaaaatctatgatcgsatgatatattttgaaaataatggtc

SEQ ID NO: 2369 - DNA, 51 bp, Homo sapiens
tgtttcgtcttctgttatctagccarcaaggcaacagctcgactttgctag

SEQ ID NO: 2370 - DNA, 51 bp, Homo sapiens; identical to SEQ ID NO: 1068

SEQ ID NO: 2371 - DNA, 51 bp, Homo sapiens; identical to SEQ ID NO: 961

SEQ ID NO: 2372 - DNA, 51 bp, Homo sapiens; identical to SEQ ID NO: 153

SEQ ID NO: 2373 - DNA, 51 bp, Homo sapiens
gctgtggtagacctttgtaattctakttcagtaaagcagattgtgctgaat

SEQ ID NO: 2374 - DNA, 51 bp, Homo sapiens
gatttaagagtaagtcattgcatacstgtggctcattcagatatgttgagc

SEQ ID NO: 2375 - DNA, 51 bp, Homo sapiens
gaaatttaatggtagctcaggacatytttataggaatgcgtgggatgacat

SEQ ID NO: 2376 - DNA, 51 bp, Homo sapiens
tgtggacctactcctgcacccccctrtcatcatggttcaccaggccccacc

SEQ ID NO: 2377 - DNA, 51 bp, Homo sapiens; identical to SEQ ID NO: 1554

SEQ ID NO: 2378 - DNA, 51 bp, Homo sapiens; identical to SEQ ID NO: 101

SEQ ID NO: 2379 - DNA, 51 bp, Homo sapiens
ggtgaccacgaccaggcagatgaaasgaccccagctgaccatggttacggt

SEQ ID NO: 2380 - DNA, 51 bp, Homo sapiens
ccaatggagggtcaaattatcatcgyttttttatttcaggattacaccaaa

SEQ ID NO: 2381 - DNA, 51 bp, Homo sapiens
ttgtgaactggatttatggaagtttktggagtttgaaaattcgagagtcct

SEQ ID NO: 2382 - DNA, 51 bp, Homo sapiens
aaagcaaagcacagttctcaaaccarattgagtgtaaaatttcaatgcaga

SEQ ID NO: 2383 - DNA, 51 bp, Homo sapiens; identical to SEQ ID NO: 530

SEQ ID NO: 2384 - DNA, 51 bp, Homo sapiens; identical to SEQ ID NO: 2225

SEQ ID NO: 2385 - DNA, 51 bp, Homo sapiens
atagctatgttgaaatgctgaaatgytatttaaaagtgaattcataactta

SEQ ID NO: 2386 - DNA, 51 bp, Homo sapiens; identical to SEQ ID NO: 119

SEQ ID NO: 2387 - DNA, 51 bp, Homo sapiens
tgtccaagacaaggtttgtctctcayttccacagatacaataggattcttc

SEQ ID NO: 2388 - DNA, 51 bp, Homo sapiens
atacatattacagtggaagaagtgcrgtatatttctacattaaatgtgtga

SEQ ID NO: 2389 - DNA, 51 bp, Homo sapiens; identical to SEQ ID NO: 91

SEQ ID NO: 2390 - DNA, 51 bp, Homo sapiens; identical to SEQ ID NO: 755

SEQ ID NO: 2391 - DNA, 51 bp, Homo sapiens
ccttgtacttttccagtctgaattcsttttgtaggctgtccctgccctgac

SEQ ID NO: 2392 - DNA, 51 bp, Homo sapiens
caccctggtgccctataccctggtgyggccccatcgacccgcccggccccg

SEQ ID NO: 2393 - DNA, 51 bp, Homo sapiens; identical to SEQ ID NO: 894

SEQ ID NO: 2394 - DNA, 51 bp, Homo sapiens
caaggaatagcaaggagtggtttacmtgaaggctgtggcatgttttcacag

SEQ ID NO: 2395 - DNA, 51 bp, Homo sapiens
ggacctcaaactggacaatgtgctgytggaccgggatggccacatcaagat

SEQ ID NO: 2396 - DNA, 51 bp, Homo sapiens; identical to SEQ ID NO: 592

SEQ ID NO: 2397 - DNA, 51 bp, Homo sapiens
ctcagttgaggagagagaagtgagcwggtctttcaacactacagtcttata

SEQ ID NO: 2398 - DNA, 51 bp, Homo sapiens
agcactacatggcagaggaccctagraaagcatgaaagtgtatggatcagc

SEQ ID NO: 2399 - DNA, 51 bp, Homo sapiens; identical to SEQ ID NO: 90

SEQ ID NO: 2400 - DNA, 51 bp, Homo sapiens; identical to SEQ ID NO: 840

SEQ ID NO: 2401 - DNA, 51 bp, Homo sapiens; identical to SEQ ID NO: 1676

SEQ ID NO: 2402 - DNA, 51 bp, Homo sapiens
ctgtgaggctaatattatagctcaaytccagaacatcttgtagtggttatt

SEQ ID NO: 2403 - DNA, 51 bp, Homo sapiens; identical to SEQ ID NO: 1851

SEQ ID NO: 2404 - DNA, 51 bp, Homo sapiens
atttcattgagttgcttgcattgcaraccaaggagcaaggctcaacaaggt

SEQ ID NO: 2405 - DNA, 51 bp, Homo sapiens
acagtcaactaatctttccggagtcygtaatacacatcagaggccatgctg

SEQ ID NO: 2406 - DNA, 51 bp, Homo sapiens
tccctcaccttggaacctttcctctscctgtttagcctctacttcccttct

SEQ ID NO: 2407 - DNA, 51 bp, Homo sapiens
aaaatgttttctatcttaatgttacktaaaatatgtgcattataattgaga

SEQ ID NO: 2408 - DNA, 51 bp, Homo sapiens; identical to SEQ ID NO: 184

SEQ ID NO: 2409 - DNA, 51 bp, Homo sapiens
gaagaagaggaagaagatacagaacrtgttctccagcttatgattatctta

SEQ ID NO: 2410 - DNA, 51 bp, Homo sapiens
ttgactgtgcctgaatgccgacaccrtgtaggaatcaacgtctcccccacc

SEQ ID NO: 2411 - DNA, 51 bp, Homo sapiens
cctctgaaagcttctgtaatgagtaygctgtgtcgcatttaggtcttgctt

SEQ ID NO: 2412 - DNA, 51 bp, Homo sapiens; identical to SEQ ID NO: 612

SEQ ID NO: 2413 - DNA, 51 bp, Homo sapiens; identical to SEQ ID NO: 2193

SEQ ID NO: 2414 - DNA, 51 bp, Homo sapiens
aagttggaaccagatttgcagcgctstatctcatacatgtttcttcttctt

SEQ ID NO: 2415 - DNA, 51 bp, Homo sapiens; identical to SEQ ID NO: 986

SEQ ID NO: 2416 - DNA, 51 bp, Homo sapiens
cacaagagaagaaaatactgctataygtactccagaacatttaatatccca

SEQ ID NO: 2417 - DNA, 51 bp, Homo sapiens
tttagaaaaggagaggaagcaaggtycaggaacatgaaatgaattgagatt

SEQ ID NO: 2418 - DNA, 51 bp, Homo sapiens; identical to SEQ ID NO: 484

SEQ ID NO: 2419 - DNA, 51 bp, Homo sapiens; identical to SEQ ID NO: 589

SEQ ID NO: 2420 - DNA, 51 bp, Homo sapiens; identical to SEQ ID NO: 406

SEQ ID NO: 2421 - DNA, 51 bp, Homo sapiens; identical to SEQ ID NO: 944

SEQ ID NO: 2422 - DNA, 51 bp, Homo sapiens
cattcaggctatttatattttctgaycatttgtggaattcaattcatacct

SEQ ID NO: 2423 - DNA, 51 bp, Homo sapiens
gtgaccatcattggccaccggttctyttaaccgttcttttctatacctagc

SEQ ID NO: 2424 - DNA, 51 bp, Homo sapiens; identical to SEQ ID NO: 1059

SEQ ID NO: 2425 - DNA, 51 bp, Homo sapiens
catctcccaatggccgagttctaatytgtattttatgcttatatgtcaaat

SEQ ID NO: 2426 - DNA, 51 bp, Homo sapiens; identical to SEQ ID NO: 711

SEQ ID NO: 2427 - DNA, 51 bp, Homo sapiens; identical to SEQ ID NO: 84

SEQ ID NO: 2428 - DNA, 51 bp, Homo sapiens
ctgggtgtggatgacagggagctagraagattggctgaacatgatggtgca

SEQ ID NO: 2429 - DNA, 51 bp, Homo sapiens
accaatttccttttacagtaaagggrcttttcctgttgcttgttgaaccgg

SEQ ID NO: 2430 - DNA, 51 bp, Homo sapiens
atcataaatatgagtggctacctgcmtccttcacaaggtcgtggtgagaag

SEQ ID NO: 2431 - DNA, 51 bp, Homo sapiens
cgaattacagaagtaagggagcaaasgtcctggaggatagtaagagcactt

SEQ ID NO: 2432 - DNA, 51 bp, Homo sapiens; identical to SEQ ID NO: 2046

SEQ ID NO: 2433 - DNA, 51 bp, Homo sapiens; identical to SEQ ID NO: 730

SEQ ID NO: 2434 - DNA, 51 bp, Homo sapiens; identical to SEQ ID NO: 1225

SEQ ID NO: 2435 - DNA, 51 bp, Homo sapiens
ccaagttcctgactagcagttgccarggctttctgtgtcctgccataagca

SEQ ID NO: 2436 - DNA, 51 bp, Homo sapiens; identical to SEQ ID NO: 133

SEQ ID NO: 2437 - DNA, 51 bp, Homo sapiens
ttgtaccataggagaggatcgctgarattatgagacttggagcttatatag

SEQ ID NO: 2438 - DNA, 51 bp, Homo sapiens; identical to SEQ ID NO: 115

SEQ ID NO: 2439 - DNA, 51 bp, Homo sapiens
ttccggtttcctctggctttgccctycttacatactcacacaccccatgac

SEQ ID NO: 2440 - DNA, 51 bp, Homo sapiens
ttgttctcttttggtatggcagccakggaagacactaatatactttccctg

SEQ ID NO: 2441 - DNA, 51 bp, Homo sapiens
atcatttacctaaaatattaatcatstcaggcatgtgtgagcttcttacat

SEQ ID NO: 2442 - DNA, 51 bp, Homo sapiens
ttctaagatttaaaacaaacaaaaamatggagggctataatgggttagaga

SEQ ID NO: 2443 - DNA, 51 bp, Homo sapiens; identical to SEQ ID NO: 259

SEQ ID NO: 2444 - DNA, 51 bp, Homo sapiens; identical to SEQ ID NO: 877

SEQ ID NO: 2445 - DNA, 51 bp, Homo sapiens
gttactctttctttccatgatcagcrtccagaggaccagaggttaatttat

SEQ ID NO: 2446 - DNA, 51 bp, Homo sapiens; identical to SEQ ID NO: 222

SEQ ID NO: 2447 - DNA, 51 bp, Homo sapiens; identical to SEQ ID NO: 1605

SEQ ID NO: 2448 - DNA, 51 bp, Homo sapiens; identical to SEQ ID NO: 174

SEQ ID NO: 2449 - DNA, 51 bp, Homo sapiens
gaccaagacatctacgccgtggtgasctaccagctgctgggtgcccagagt

SEQ ID NO: 2450 - DNA, 51 bp, Homo sapiens
ccaagttctcctgattagtgaggctrcaaaaaatgtttggcatgttattct

SEQ ID NO: 2451 - DNA, 51 bp, Homo sapiens; identical to SEQ ID NO: 613

SEQ ID NO: 2452 - DNA, 51 bp, Homo sapiens
aaacttcccactctgctcatatctgwattggtatttgctcactgttgcgca

SEQ ID NO: 2453 - DNA, 51 bp, Homo sapiens; identical to SEQ ID NO: 465

SEQ ID NO: 2454 - DNA, 51 bp, Homo sapiens
ttcttttatgtgtaacctgattcaakatcttaaaatagctgacagcaaaat

SEQ ID NO: 2455 - DNA, 51 bp, Homo sapiens
tagaattcaggcaatggcttaatcayaaggaactacatgtgagcctaatgt

SEQ ID NO: 2456 - DNA, 51 bp, Homo sapiens
actcacgtgactgcgcttctccatayggacttagccacatcttgaaaacag

SEQ ID NO: 2457 - DNA, 51 bp, Homo sapiens; identical to SEQ ID NO: 39

SEQ ID NO: 2458 - DNA, 51 bp, Homo sapiens
ccctacatgaacttgagcaatttccrtatctttctaggcctttgtttttct

SEQ ID NO: 2459 - DNA, 51 bp, Homo sapiens
ctccctgacatcaaccagaaccctcrggctgagcagtaagttctgttttgg

SEQ ID NO: 2460 - DNA, 51 bp, Homo sapiens; identical to SEQ ID NO: 1246

SEQ ID NO: 2461 - DNA, 51 bp, Homo sapiens
aggaatggagggaatcacagataackgcatgagcaaaaggatacagatctg

SEQ ID NO: 2462 - DNA, 51 bp, Homo sapiens
attaataagcactcaccatttctttyggctgccatctctcgtgctctcttt

SEQ ID NO: 2463 - DNA, 51 bp, Homo sapiens
tgactctcatgaagtttagggccacragaagtctttacaccatcatagcac

SEQ ID NO: 2464 - DNA, 51 bp, Homo sapiens; identical to SEQ ID NO: 518

SEQ ID NO: 2465 - DNA, 51 bp, Homo sapiens; identical to SEQ ID NO: 276

SEQ ID NO: 2466 - DNA, 51 bp, Homo sapiens; identical to SEQ ID NO: 97

SEQ ID NO: 2467 - DNA, 51 bp, Homo sapiens; identical to SEQ ID NO: 1087

SEQ ID NO: 2468 - DNA, 51 bp, Homo sapiens; identical to SEQ ID NO: 336

SEQ ID NO: 2469 - DNA, 51 bp, Homo sapiens; identical to SEQ ID NO: 25

SEQ ID NO: 2470 - DNA, 51 bp, Homo sapiens; identical to SEQ ID NO: 2190

SEQ ID NO: 2471 - DNA, 51 bp, Homo sapiens
caggaattcaacaggatattcaaagkatcagacaccgtgatcaagtgagat

SEQ ID NO: 2472 - DNA, 51 bp, Homo sapiens; identical to SEQ ID NO: 2200

SEQ ID NO: 2473 - DNA, 51 bp, Homo sapiens; identical to SEQ ID NO: 382

SEQ ID NO: 2474 - DNA, 51 bp, Homo sapiens; identical to SEQ ID NO: 1834

SEQ ID NO: 2475 - DNA, 51 bp, Homo sapiens
tccctctaatgcaattgccttttcamcccccagccagacacgaggccccgg

SEQ ID NO: 2476 - DNA, 51 bp, Homo sapiens
gtagcccgtagcttttagtctcattwctagagggcaagctagagagctggt

SEQ ID NO: 2477 - DNA, 51 bp, Homo sapiens; identical to SEQ ID NO: 168

SEQ ID NO: 2478 - DNA, 51 bp, Homo sapiens; identical to SEQ ID NO: 1077

SEQ ID NO: 2479 - DNA, 51 bp, Homo sapiens; identical to SEQ ID NO: 843

SEQ ID NO: 2480 - DNA, 51 bp, Homo sapiens; identical to SEQ ID NO: 1565

SEQ ID NO: 2481 - DNA, 51 bp, Homo sapiens
acattaattttgttgaaacctactcrgtcaatcttatcacagtctattcct

SEQ ID NO: 2482 - DNA, 51 bp, Homo sapiens; identical to SEQ ID NO: 2120

SEQ ID NO: 2483 - DNA, 51 bp, Homo sapiens; identical to SEQ ID NO: 627

SEQ ID NO: 2484 - DNA, 51 bp, Homo sapiens; identical to SEQ ID NO: 544

SEQ ID NO: 2485 - DNA, 51 bp, Homo sapiens; identical to SEQ ID NO: 2255

SEQ ID NO: 2486 - DNA, 51 bp, Homo sapiens; identical to SEQ ID NO: 1009

SEQ ID NO: 2487 - DNA, 51 bp, Homo sapiens; identical to SEQ ID NO: 505

SEQ ID NO: 2488 - DNA, 51 bp, Homo sapiens
agactcttggatttctgaagaggaasagctgatagccctgtggtttcattt

SEQ ID NO: 2489 - DNA, 51 bp, Homo sapiens
acgtttactggaaaactactaagagsctggactattttcagagggaaaata

SEQ ID NO: 2490 - DNA, 51 bp, Homo sapiens
aaactctctcactttcctgaaaaggrtagttgtccagataatataagcaga

SEQ ID NO: 2491 - DNA, 51 bp, Homo sapiens; identical to SEQ ID NO: 455

SEQ ID NO: 2492 - DNA, 51 bp, Homo sapiens; identical to SEQ ID NO: 117

SEQ ID NO: 2493 - DNA, 51 bp, Homo sapiens
cattgatctgcatctctctctcttayagtccacttatgtgtaatctctacg

SEQ ID NO: 2494 - DNA, 51 bp, Homo sapiens
agaggccacctggattacgaggctcrtggcccttctcagcttcaaagccag

SEQ ID NO: 2495 - DNA, 51 bp, Homo sapiens
gcgctagcaagaccaaaaggatttayaaacttcaatccggccatttctaca

SEQ ID NO: 2496 - DNA, 51 bp, Homo sapiens
gcgaacgttgtcctccgctgcagtgygccccctctccctctctgtctgcag

SEQ ID NO: 2497 - DNA, 51 bp, Homo sapiens
catagcccgcgtccgaatggaggagmatttcatacagaaggcggagggggt

SEQ ID NO: 2498 - DNA, 51 bp, Homo sapiens
tcagacactgaacacatgtctatggrgaaacgctgtaaagtccagcagagg

SEQ ID NO: 2499 - DNA, 51 bp, Homo sapiens
ccagtctatcacaggcaaaccggacrctgtgtgtggctactcaagctaggg

SEQ ID NO: 2500 - DNA, 51 bp, Homo sapiens; identical to SEQ ID NO: 698

SEQ ID NO: 2501 - DNA, 51 bp, Homo sapiens; identical to SEQ ID NO: 319

SEQ ID NO: 2502 - DNA, 51 bp, Homo sapiens
ccgaaatgtgaccctttttcaatgtytccctgaatgacccacagaagcccc

SEQ ID NO: 2503 - DNA, 51 bp, Homo sapiens; identical to SEQ ID NO: 242

SEQ ID NO: 2504 - DNA, 51 bp, Homo sapiens
tcccagctctgctcaacagtccaggygagcccatttaaccccaggttacag

SEQ ID NO: 2505 - DNA, 51 bp, Homo sapiens; identical to SEQ ID NO: 2070

SEQ ID NO: 2506 - DNA, 51 bp, Homo sapiens
acaatctatgcaatgactatatccawtttcctaagagtcaaatttgatatt

SEQ ID NO: 2507 - DNA, 51 bp, Homo sapiens
ggaagagctatcacagggaaaactgrcttgtggcaaatctcttattaaaaa

SEQ ID NO: 2508 - DNA, 51 bp, Homo sapiens
tttctcacataaataatttaaaaggkagcacaagggtcaaccatctatttt

SEQ ID NO: 2509 - DNA, 51 bp, Homo sapiens; identical to SEQ ID NO: 452

SEQ ID NO: 2510 - DNA, 51 bp, Homo sapiens; identical to SEQ ID NO: 873

SEQ ID NO: 2511 - DNA, 51 bp, Homo sapiens
cgaggctcgtggcccttctcagcttyaaagccagcagtgtgactctaaagc

SEQ ID NO: 2512 - DNA, 51 bp, Homo sapiens; identical to SEQ ID NO: 937

SEQ ID NO: 2513 - DNA, 51 bp, Homo sapiens; identical to SEQ ID NO: 1839

SEQ ID NO: 2514 - DNA, 51 bp, Homo sapiens; identical to SEQ ID NO: 517

SEQ ID NO: 2515 - DNA, 51 bp, Homo sapiens
cgaattccctagccacttattcaacrcttttcgtgctatccagaagatcag

SEQ ID NO: 2516 - DNA, 51 bp, Homo sapiens
tcattgattcattcatactctctcarctacccttatctgactaacgaacta

SEQ ID NO: 2517 - DNA, 51 bp, Homo sapiens
agcaccatagtagatggttaatgaartggttaaagactgttaaacaatatc

SEQ ID NO: 2518 - DNA, 51 bp, Homo sapiens; identical to SEQ ID NO: 1094

SEQ ID NO: 2519 - DNA, 51 bp, Homo sapiens; identical to SEQ ID NO: 73

SEQ ID NO: 2520 - DNA, 51 bp, Homo sapiens
ttctggcatttgcttcagtaagcacrctgagaagggtccaactggcattta

SEQ ID NO: 2521 - DNA, 51 bp, Homo sapiens
cacatatgacaaaggccaatcttttmtttttcttactacttttagatttaa

SEQ ID NO: 2522 - DNA, 51 bp, Homo sapiens; identical to SEQ ID NO: 287

SEQ ID NO: 2523 - DNA, 51 bp, Homo sapiens
aagagagaaaaataaaatcactcagkgcaaatgaacagactggggaatgag

SEQ ID NO: 2524 - DNA, 51 bp, Homo sapiens; identical to SEQ ID NO: 1721

SEQ ID NO: 2525 - DNA, 51 bp, Homo sapiens; identical to SEQ ID NO: 995

SEQ ID NO: 2526 - DNA, 51 bp, Homo sapiens; identical to SEQ ID NO: 130

SEQ ID NO: 2527 - DNA, 51 bp, Homo sapiens; identical to SEQ ID NO: 1116

SEQ ID NO: 2528 - DNA, 51 bp, Homo sapiens
tactggatcagcagacatttcctgasaaagggtcagtgggccaccacctcg

SEQ ID NO: 2529 - DNA, 51 bp, Homo sapiens; identical to SEQ ID NO: 1113

SEQ ID NO: 2530 - DNA, 51 bp, Homo sapiens
gtactgttggagccacgcttaccatrtttccttttctttcctaaaacaaaa

SEQ ID NO: 2531 - DNA, 51 bp, Homo sapiens; identical to SEQ ID NO: 524

SEQ ID NO: 2532 - DNA, 51 bp, Homo sapiens
ccttatagactctaaaggttatggcrttggcactcccatgggtaggttata

SEQ ID NO: 2533 - DNA, 51 bp, Homo sapiens; identical to SEQ ID NO: 281

SEQ ID NO: 2534 - DNA, 51 bp, Homo sapiens; identical to SEQ ID NO: 2321

SEQ ID NO: 2535 - DNA, 51 bp, Homo sapiens; identical to SEQ ID NO: 57

SEQ ID NO: 2536 - DNA, 51 bp, Homo sapiens; identical to SEQ ID NO: 638

SEQ ID NO: 2537 - DNA, 51 bp, Homo sapiens
acccctgaatgtgtccagactggtastaagccctgggaggatgcgtctggg

SEQ ID NO: 2538 - DNA, 51 bp, Homo sapiens
gattttggtaaagcgctttttgtccrtagaaatcaaaattaagagatgggg

SEQ ID NO: 2539 - DNA, 51 bp, Homo sapiens
ctcaggcattttaatatgttaaataygcatccaattattaattctaaagac

SEQ ID NO: 2540 - DNA, 51 bp, Homo sapiens
tggctgcctgtttctgcaaacaccasggcagagcttgcagtgcctaacctg

SEQ ID NO: 2541 - DNA, 51 bp, Homo sapiens; identical to SEQ ID NO: 21

SEQ ID NO: 2542 - DNA, 51 bp, Homo sapiens
gcaaggggtcatcactatctccagcrctcctgaacttacattttattaatt

SEQ ID NO: 2543 - DNA, 51 bp, Homo sapiens
ccatgatcacctttgaccagttttgyctgccgtctcatcaagtaccgtgtg

SEQ ID NO: 2544 - DNA, 51 bp, Homo sapiens; identical to SEQ ID NO: 408

SEQ ID NO: 2545 - DNA, 51 bp, Homo sapiens
ataactttaagaaagggacacttgtrtttgactttgaagggtggcaaaatt

SEQ ID NO: 2546 - DNA, 51 bp, Homo sapiens
gactgtctgaatgggatatctgtgcscataagcatttccctacactaatgg

SEQ ID NO: 2547 - DNA, 51 bp, Homo sapiens; identical to SEQ ID NO: 1118

SEQ ID NO: 2548 - DNA, 51 bp, Homo sapiens
taaaactctggtaattcaaaccaaawatttcctcactgaaaactatgcttg

SEQ ID NO: 2549 - DNA, 51 bp, Homo sapiens
tttattacccactcatcgttgttctkaacgggggaaaaaagagaaaagaag

SEQ ID NO: 2550 - DNA, 51 bp, Homo sapiens
gttcaaggttgggaggcactgagcascgcggataagaatgtgggctttgag

SEQ ID NO: 2551 - DNA, 51 bp, Homo sapiens; identical to SEQ ID NO: 106

SEQ ID NO: 2552 - DNA, 51 bp, Homo sapiens; identical to SEQ ID NO: 1501

SEQ ID NO: 2553 - DNA, 51 bp, Homo sapiens
gcgaagatcttgagtgtgaagcccaygtagtcctgccatgccacacacagg

SEQ ID NO: 2554 - DNA, 51 bp, Homo sapiens
gagcttattttctatacatatttttrcattcgctttttctgagtgcttcta

SEQ ID NO: 2555 - DNA, 51 bp, Homo sapiens; identical to SEQ ID NO: 1727

SEQ ID NO: 2556 - DNA, 51 bp, Homo sapiens
tttttattgttgttatgattacgctrtggggttgtttatcagtttaagaaa

SEQ ID NO: 2557 - DNA, 51 bp, Homo sapiens; identical to SEQ ID NO: 1255

SEQ ID NO: 2558 - DNA, 51 bp, Homo sapiens; identical to SEQ ID NO: 885

SEQ ID NO: 2559 - DNA, 51 bp, Homo sapiens; identical to SEQ ID NO: 1738

SEQ ID NO: 2560 - DNA, 51 bp, Homo sapiens; identical to SEQ ID NO: 1585

SEQ ID NO: 2561 - DNA, 51 bp, Homo sapiens
cgggatttcagggggttaccaagacycagacaggaaacggctttcaccctg

SEQ ID NO: 2562 - DNA, 51 bp, Homo sapiens; identical to SEQ ID NO: 477

SEQ ID NO: 2563 - DNA, 51 bp, Homo sapiens; identical to SEQ ID NO: 985

SEQ ID NO: 2564 - DNA, 51 bp, Homo sapiens
atagtcaatttttagctcactttagraatataaatgatacaactgagaata

SEQ ID NO: 2565 - DNA, 51 bp, Homo sapiens; identical to SEQ ID NO: 1569

SEQ ID NO: 2566 - DNA, 51 bp, Homo sapiens
gattgcctcccccggggtctaccggygccaccttcctggcggtatgccggg

SEQ ID NO: 2567 - DNA, 51 bp, Homo sapiens
ggccgatgagtgtgagttccttttgktccctcttcatatatccaggccagg

SEQ ID NO: 2568 - DNA, 51 bp, Homo sapiens; identical to SEQ ID NO: 595

SEQ ID NO: 2569 - DNA, 51 bp, Homo sapiens; identical to SEQ ID NO: 351

SEQ ID NO: 2570 - DNA, 51 bp, Homo sapiens; identical to SEQ ID NO: 1688

SEQ ID NO: 2571 - DNA, 51 bp, Homo sapiens; identical to SEQ ID NO: 49

SEQ ID NO: 2572 - DNA, 51 bp, Homo sapiens; identical to SEQ ID NO: 1998

SEQ ID NO: 2573 - DNA, 51 bp, Homo sapiens; identical to SEQ ID NO: 1215

SEQ ID NO: 2574 - DNA, 51 bp, Homo sapiens; identical to SEQ ID NO: 507

SEQ ID NO: 2575 - DNA, 51 bp, Homo sapiens; identical to SEQ ID NO: 1222

SEQ ID NO: 2576 - DNA, 51 bp, Homo sapiens
aacaattcaaaaatcagggatcatarcactgacaaaagctctaaagtaata

SEQ ID NO: 2577 - DNA, 51 bp, Homo sapiens
attccttcacactgcaaattccactrttgaaacttttactacaatgggtat

SEQ ID NO: 2578 - DNA, 51 bp, Homo sapiens
ggaaaattgacgtttcatctttgtamctcacattcgtgtttaattatttac

SEQ ID NO: 2579 - DNA, 51 bp, Homo sapiens
aattgtgttttccaaaagagtatcartttgcagatctataatttactgaaa

SEQ ID NO: 2580 - DNA, 51 bp, Homo sapiens
ttttaatgtcattcttatcacacacmattcatgggtttgcttctaagtttt

SEQ ID NO: 2581 - DNA, 51 bp, Homo sapiens
aatgtcctacatttggtgcctagagrgaaactgttactcacttgtagatgt

SEQ ID NO: 2582 - DNA, 51 bp, Homo sapiens; identical to SEQ ID NO: 1006

SEQ ID NO: 2583 - DNA, 51 bp, Homo sapiens; identical to SEQ ID NO: 45

SEQ ID NO: 2584 - DNA, 51 bp, Homo sapiens; identical to SEQ ID NO: 1165

SEQ ID NO: 2585 - DNA, 51 bp, Homo sapiens; identical to SEQ ID NO: 1112

SEQ ID NO: 2586 - DNA, 51 bp, Homo sapiens; identical to SEQ ID NO: 83

SEQ ID NO: 2587 - DNA, 51 bp, Homo sapiens; identical to SEQ ID NO: 1155

SEQ ID NO: 2588 - DNA, 51 bp, Homo sapiens
tgttacttaagaggaatggtagtttygccttaaggtaggagtatctcagga

SEQ ID NO: 2589 - DNA, 51 bp, Homo sapiens
tgtctaatttgaagaactgctgtgcytccttcttaatgataataatgcttt

SEQ ID NO: 2590 - DNA, 51 bp, Homo sapiens
caacggcacagtcacctatgccatcrtcgcaggcaacatcgtcaacacctt

SEQ ID NO: 2591 - DNA, 51 bp, Homo sapiens; identical to SEQ ID NO: 694

SEQ ID NO: 2592 - DNA, 51 bp, Homo sapiens; identical to SEQ ID NO: 670

SEQ ID NO: 2593 - DNA, 51 bp, Homo sapiens
ccggcctgttattacatgagtttatkaacattcactgtgagatgccttggt

SEQ ID NO: 2594 - DNA, 51 bp, Homo sapiens
tgggctcagagtggcattactgtcartcttggttcacccctcactgactgc

SEQ ID NO: 2595 - DNA, 51 bp, Homo sapiens
catttttatatatattacgcttctgsttaaagattaacgcattcctactct

SEQ ID NO: 2596 - DNA, 51 bp, Homo sapiens; identical to SEQ ID NO: 691

SEQ ID NO: 2597 - DNA, 51 bp, Homo sapiens
ttgcatataaattgttttgacaacayctgtagttaatttggaagaagtgag

SEQ ID NO: 2598 - DNA, 51 bp, Homo sapiens
caaatgaactgcaagtgaaatagatmttgatcatctctagctgacaacatg

SEQ ID NO: 2599 - DNA, 51 bp, Homo sapiens
ccttcaaatggggtgatgcacacacragtagcatgaaattagccatgttca

SEQ ID NO: 2600 - DNA, 51 bp, Homo sapiens
agaaaacaatggaacagtaacaatcratcattatgagctatcaccaagaca

SEQ ID NO: 2601 - DNA, 51 bp, Homo sapiens
ggtagataaaatcattccagataatmcttcctttggcagataattgagcat

SEQ ID NO: 2602 - DNA, 51 bp, Homo sapiens
ttgcaaacaaagactgaaaaggtgaygcaaaaatttaatggcaggaaaaag

SEQ ID NO: 2603 - DNA, 51 bp, Homo sapiens
gtggctcgcgtgatatgaaaggccamagcatagagtttcgtgaggaagaag

SEQ ID NO: 2604 - DNA, 51 bp, Homo sapiens; identical to SEQ ID NO: 53

SEQ ID NO: 2605 - DNA, 51 bp, Homo sapiens
gagtccttgccctctgaggatttggkaggactggaagccagaggccccagg

SEQ ID NO: 2606 - DNA, 51 bp, Homo sapiens
ttatgcattcttcttgatagtccatwcataactaagcaaactatttttctc

SEQ ID NO: 2607 - DNA, 51 bp, Homo sapiens; identical to SEQ ID NO: 1102

SEQ ID NO: 2608 - DNA, 51 bp, Homo sapiens; identical to SEQ ID NO: 1714

SEQ ID NO: 2609 - DNA, 51 bp, Homo sapiens
tagacagtggctagcgtggaaatcamtgattgatccctttatgtcaagtac

SEQ ID NO: 2610 - DNA, 51 bp, Homo sapiens; identical to SEQ ID NO: 149

SEQ ID NO: 2611 - DNA, 51 bp, Homo sapiens
tttaacatagtgtttaaatgagtagwtaactataaggtatataatgagtcc

SEQ ID NO: 2612 - DNA, 51 bp, Homo sapiens
agccataaactaaaaatcaaatgtaygaaaaactatgtcttgcctttgtat

SEQ ID NO: 2613 - DNA, 51 bp, Homo sapiens
gggaggtcatgggattgatcggcgtrtgcagacacatgggagacagaagaa

SEQ ID NO: 2614 - DNA, 51 bp, Homo sapiens; identical to SEQ ID NO: 1114

SEQ ID NO: 2615 - DNA, 51 bp, Homo sapiens; identical to SEQ ID NO: 1265

SEQ ID NO: 2616 - DNA, 51 bp, Homo sapiens
cttttcagcttttactgatataaatrttctatgcttccatgctgtgactta

SEQ ID NO: 2617 - DNA, 51 bp, Homo sapiens
aacacggtgaagaaatgcagtgagtrctgtgaaggacatgaagagactgac

SEQ ID NO: 2618 - DNA, 51 bp, Homo sapiens; identical to SEQ ID NO: 478

SEQ ID NO: 2619 - DNA, 51 bp, Homo sapiens
tgggtaaagagggttctagtgctcaragttcttgggtgtacatcatctgtg

SEQ ID NO: 2620 - DNA, 51 bp, Homo sapiens; identical to SEQ ID NO: 1862

SEQ ID NO: 2621 - DNA, 51 bp, Homo sapiens; identical to SEQ ID NO: 653

SEQ ID NO: 2622 - DNA, 51 bp, Homo sapiens
gaatgcagcaggcttttagcaccgcycaacatgaatgaagggacaaatgaa

SEQ ID NO: 2623 - DNA, 51 bp, Homo sapiens
gggagctgtaacttggttcctcaacyggtgaccttccccagtgagcccttc

SEQ ID NO: 2624 - DNA, 51 bp, Homo sapiens
aaaaacatcatttagaaactagcaaragcacattagttccacaggaaatct

SEQ ID NO: 2625 - DNA, 51 bp, Homo sapiens; identical to SEQ ID NO: 5

SEQ ID NO: 2626 - DNA, 51 bp, Homo sapiens; identical to SEQ ID NO: 1124

SEQ ID NO: 2627 - DNA, 51 bp, Homo sapiens; identical to SEQ ID NO: 1690

SEQ ID NO: 2628 - DNA, 51 bp, Homo sapiens
cccatggaggtgtctccccgaggacscatctaaaacacctctgcccccagt

SEQ ID NO: 2629 - DNA, 51 bp, Homo sapiens; identical to SEQ ID NO: 704

SEQ ID NO: 2630 - DNA, 51 bp, Homo sapiens
gtttacctttttccatggagtctcckggcaaagaataaaatatatttattt

SEQ ID NO: 2631 - DNA, 51 bp, Homo sapiens
ccatcttctttcttttgcaccctttwggtaccagaagctccaagggcagcc

SEQ ID NO: 2632 - DNA, 51 bp, Homo sapiens; identical to SEQ ID NO: 1822

SEQ ID NO: 2633 - DNA, 51 bp, Homo sapiens; identical to SEQ ID NO: 255

SEQ ID NO: 2634 - DNA, 51 bp, Homo sapiens; identical to SEQ ID NO: 795

SEQ ID NO: 2635 - DNA, 51 bp, Homo sapiens
cattccaactcaactgccctcgcgtyctggccacaggccccctgggagacc

SEQ ID NO: 2636 - DNA, 51 bp, Homo sapiens
catttgtattaacagtgagcacctcrggcagttctgcgatggctgctccaa

SEQ ID NO: 2637 - DNA, 51 bp, Homo sapiens
tcaagttttagtactgttgatacaartaactgtggttcatttttcttcact

SEQ ID NO: 2638 - DNA, 51 bp, Homo sapiens
cctctgatggatctgggcaaaggaartcgaaaaccttctgaaaaggattca

SEQ ID NO: 2639 - DNA, 51 bp, Homo sapiens; identical to SEQ ID NO: 1206

SEQ ID NO: 2640 - DNA, 51 bp, Homo sapiens; identical to SEQ ID NO: 511

SEQ ID NO: 2641 - DNA, 51 bp, Homo sapiens; identical to SEQ ID NO: 1717

SEQ ID NO: 2642 - DNA, 51 bp, Homo sapiens
gccctttaattggttagtccattgayataattactgaaaaggtaagattta

SEQ ID NO: 2643 - DNA, 51 bp, Homo sapiens
aatatcagaggcctgaatactgaacrggggaaattatggacaactgaaata

SEQ ID NO: 2644 - DNA, 51 bp, Homo sapiens
caaaagcttcttggtatgaaagagtrtgtttttgcccagctcttagctcta

SEQ ID NO: 2645 - DNA, 51 bp, Homo sapiens
cgcttttcatattgcgaaagggtttraggaataatgtaacatatacttgtg

SEQ ID NO: 2646 - DNA, 51 bp, Homo sapiens; identical to SEQ ID NO: 640

SEQ ID NO: 2647 - DNA, 51 bp, Homo sapiens; identical to SEQ ID NO: 1756

SEQ ID NO: 2648 - DNA, 51 bp, Homo sapiens
aatagctctacatgtgcacagaaccrtccttactgttggagtcatatgaat

SEQ ID NO: 2649 - DNA, 51 bp, Homo sapiens; identical to SEQ ID NO: 147

SEQ ID NO: 2650 - DNA, 51 bp, Homo sapiens
gaactttcttcagaagctccaccctrtaattctgaacctgcagaagaatct

SEQ ID NO: 2651 - DNA, 51 bp, Homo sapiens
aatgtcaaggcaaagatgatctcagscatagttctgacctcctgtgcagag

SEQ ID NO: 2652 - DNA, 51 bp, Homo sapiens
gctaatttaacatgtacaactatttrtaagttgcatgtaagagacacaact

SEQ ID NO: 2653 - DNA, 51 bp, Homo sapiens; identical to SEQ ID NO: 124

SEQ ID NO: 2654 - DNA, 51 bp, Homo sapiens; identical to SEQ ID NO: 1133

SEQ ID NO: 2655 - DNA, 51 bp, Homo sapiens
atagggaaggatggttgtgaagatcmaatgagaaaaactacaaaccccaag

SEQ ID NO: 2656 - DNA, 51 bp, Homo sapiens
caaccccttaacacaattttgcagcrttcatattttgaaatcacatgtgga

SEQ ID NO: 2657 - DNA, 51 bp, Homo sapiens
ttgacccctgtcattgtctttggccwctgggtcctcatttgccttgtgatt

SEQ ID NO: 2658 - DNA, 51 bp, Homo sapiens
ccttaactctctgtaactactaaaartaaccaaagcacacaattcccttga

SEQ ID NO: 2659 - DNA, 51 bp, Homo sapiens; identical to SEQ ID NO: 2233

SEQ ID NO: 2660 - DNA, 51 bp, Homo sapiens; identical to SEQ ID NO: 149

SEQ ID NO: 2661 - DNA, 51 bp, Homo sapiens; identical to SEQ ID NO: 792

SEQ ID NO: 2662 - DNA, 51 bp, Homo sapiens; identical to SEQ ID NO: 2063

SEQ ID NO: 2663 - DNA, 51 bp, Homo sapiens; identical to SEQ ID NO: 209

SEQ ID NO: 2664 - DNA, 51 bp, Homo sapiens; identical to SEQ ID NO: 2363

SEQ ID NO: 2665 - DNA, 51 bp, Homo sapiens; identical to SEQ ID NO: 2355

SEQ ID NO: 2666 - DNA, 51 bp, Homo sapiens; identical to SEQ ID NO: 755

SEQ ID NO: 2667 - DNA, 51 bp, Homo sapiens; identical to SEQ ID NO: 1675

SEQ ID NO: 2668 - DNA, 51 bp, Homo sapiens; identical to SEQ ID NO: 1917

SEQ ID NO: 2669 - DNA, 51 bp, Homo sapiens; identical to SEQ ID NO: 1133

SEQ ID NO: 2670 - DNA, 51 bp, Homo sapiens; identical to SEQ ID NO: 27

SEQ ID NO: 2671 - DNA, 51 bp, Homo sapiens; identical to SEQ ID NO: 127

SEQ ID NO: 2672 - DNA, 51 bp, Homo sapiens
gtgggcggcaccatatcataggagayaaccctaacagcagtgagtgtttgt

SEQ ID NO: 2673 - DNA, 51 bp, Homo sapiens; identical to SEQ ID NO: 1570

SEQ ID NO: 2674 - DNA, 51 bp, Homo sapiens
tctaccctctcctacatcacagatcygccagagttggtgaggaatacaagc

SEQ ID NO: 2675 - DNA, 51 bp, Homo sapiens; identical to SEQ ID NO: 9

SEQ ID NO: 2676 - DNA, 51 bp, Homo sapiens; identical to SEQ ID NO: 897

SEQ ID NO: 2677 - DNA, 51 bp, Homo sapiens; identical to SEQ ID NO: 1222

SEQ ID NO: 2678 - DNA, 51 bp, Homo sapiens
gtattgttaattatgtgctgaaaatkaaattctggtcagtctttgcagaag

SEQ ID NO: 2679 - DNA, 51 bp, Homo sapiens; identical to SEQ ID NO: 1412

SEQ ID NO: 2680 - DNA, 51 bp, Homo sapiens
gctcaataaggttaagtaagccattktaagttggtaaccatttcttggaat

SEQ ID NO: 2681 - DNA, 51 bp, Homo sapiens; identical to SEQ ID NO: 2404

SEQ ID NO: 2682 - DNA, 51 bp, Homo sapiens; identical to SEQ ID NO: 1406

SEQ ID NO: 2683 - DNA, 51 bp, Homo sapiens; identical to SEQ ID NO: 2361

SEQ ID NO: 2684 - DNA, 51 bp, Homo sapiens; identical to SEQ ID NO: 1805

SEQ ID NO: 2685 - DNA, 51 bp, Homo sapiens
caaaaatattcacatataccagatcrcttaggatttcatttgagctatgaa

SEQ ID NO: 2686 - DNA, 51 bp, Homo sapiens
cactacaagagaaatactcccaatcmtaacagtcatttatatcttggcctg

SEQ ID NO: 2687 - DNA, 51 bp, Homo sapiens; identical to SEQ ID NO: 95

SEQ ID NO: 2688 - DNA, 51 bp, Homo sapiens; identical to SEQ ID NO: 795

SEQ ID NO: 2689 - DNA, 51 bp, Homo sapiens; identical to SEQ ID NO: 101

SEQ ID NO: 2690 - DNA, 51 bp, Homo sapiens
tgtattagggactccacttttcactragcacataatttgatacttactggt

SEQ ID NO: 2691 - DNA, 51 bp, Homo sapiens; identical to SEQ ID NO: 1279

SEQ ID NO: 2692 - DNA, 51 bp, Homo sapiens; identical to SEQ ID NO: 637

SEQ ID NO: 2693 - DNA, 51 bp, Homo sapiens
ctgtattaatgcattggccatttctkcaaagattcccatttccacttgcac

SEQ ID NO: 2694 - DNA, 51 bp, Homo sapiens; identical to SEQ ID NO: 7

SEQ ID NO: 2695 - DNA, 51 bp, Homo sapiens; identical to SEQ ID NO: 2556

SEQ ID NO: 2696 - DNA, 51 bp, Homo sapiens; identical to SEQ ID NO: 1009

SEQ ID NO: 2697 - DNA, 51 bp, Homo sapiens; identical to SEQ ID NO: 1272

SEQ ID NO: 2698 - DNA, 51 bp, Homo sapiens
gatgaaatcaatattctattccttartgctgctaactataacttccaaacc

SEQ ID NO: 2699 - DNA, 51 bp, Homo sapiens; identical to SEQ ID NO: 1598

SEQ ID NO: 2700 - DNA, 51 bp, Homo sapiens; identical to SEQ ID NO: 986

SEQ ID NO: 2701 - DNA, 51 bp, Homo sapiens
caaatatatttctggcatacatcttycttaacctacattatcctcctactg

SEQ ID NO: 2702 - DNA, 51 bp, Homo sapiens; identical to SEQ ID NO: 724

SEQ ID NO: 2703 - DNA, 51 bp, Homo sapiens
aatctatcatctgaatgagtattgayataaagcataggtttataggtttat

SEQ ID NO: 2704 - DNA, 51 bp, Homo sapiens; identical to SEQ ID NO: 505

SEQ ID NO: 2705 - DNA, 51 bp, Homo sapiens; identical to SEQ ID NO: 2601

SEQ ID NO: 2706 - DNA, 51 bp, Homo sapiens; identical to SEQ ID NO: 1242

SEQ ID NO: 2707 - DNA, 51 bp, Homo sapiens
ggatttgtctgaaatggtttgtccayacaaaggctttgcttgaatggtggg

SEQ ID NO: 2708 - DNA, 51 bp, Homo sapiens
gtcactttggctggctcccccctgcmggaagccggaagcgatctcatcgaa

SEQ ID NO: 2709 - DNA, 51 bp, Homo sapiens; identical to SEQ ID NO: 2298

SEQ ID NO: 2710 - DNA, 51 bp, Homo sapiens; identical to SEQ ID NO: 2523

SEQ ID NO: 2711 - DNA, 51 bp, Homo sapiens; identical to SEQ ID NO: 1809

SEQ ID NO: 2712 - DNA, 51 bp, Homo sapiens; identical to SEQ ID NO: 1392

SEQ ID NO: 2713 - DNA, 51 bp, Homo sapiens; identical to SEQ ID NO: 2463

SEQ ID NO: 2714 - DNA, 51 bp, Homo sapiens; identical to SEQ ID NO: 162

SEQ ID NO: 2715 - DNA, 51 bp, Homo sapiens; identical to SEQ ID NO: 108

SEQ ID NO: 2716 - DNA, 51 bp, Homo sapiens; identical to SEQ ID NO: 2622

SEQ ID NO: 2717 - DNA, 51 bp, Homo sapiens; identical to SEQ ID NO: 944

SEQ ID NO: 2718 - DNA, 51 bp, Homo sapiens
aaatgggctcactgttgaatgcctcrgagattgaggtactcagtttgagca

SEQ ID NO: 2719 - DNA, 51 bp, Homo sapiens; identical to SEQ ID NO: 8

SEQ ID NO: 2720 - DNA, 51 bp, Homo sapiens
gagactgctttgtcaaggacacaaartaattgccctcagcaggacctgaag

SEQ ID NO: 2721 - DNA, 51 bp, Homo sapiens
gttggcagaggcctccagggtttccyggcaactcagtcctttcgcagtgac

SEQ ID NO: 2722 - DNA, 51 bp, Homo sapiens; identical to SEQ ID NO: 1673

SEQ ID NO: 2723 - DNA, 51 bp, Homo sapiens; identical to SEQ ID NO: 2450

SEQ ID NO: 2724 - DNA, 51 bp, Homo sapiens; identical to SEQ ID NO: 691

SEQ ID NO: 2725 - DNA, 51 bp, Homo sapiens
aatttaaaaggcagaaagttacagcraaagcaactgcaaagggcctgaggt

SEQ ID NO: 2726 - DNA, 51 bp, Homo sapiens
tgtcacagaagggctaagtcgtgtcmagtgaaaggagcaagagagggttgg

SEQ ID NO: 2727 - DNA, 51 bp, Homo sapiens
ccacttcttccctgatataacaattkcccttgggtatgtcaactcaaaact

SEQ ID NO: 2728 - DNA, 51 bp, Homo sapiens; identical to SEQ ID NO: 60

SEQ ID NO: 2729 - DNA, 51 bp, Homo sapiens
gcaccactgaaagtcttctttagccrgaactcttagataatttaggagaca

SEQ ID NO: 2730 - DNA, 51 bp, Homo sapiens; identical to SEQ ID NO: 1590

SEQ ID NO: 2731 - DNA, 51 bp, Homo sapiens
caatagcaacgtttttgaatcagagragtgattttgaacacactgtacata

SEQ ID NO: 2732 - DNA, 51 bp, Homo sapiens; identical to SEQ ID NO: 2062

SEQ ID NO: 2733 - DNA, 51 bp, Homo sapiens; identical to SEQ ID NO: 1332

SEQ ID NO: 2734 - DNA, 51 bp, Homo sapiens; identical to SEQ ID NO: 1889

SEQ ID NO: 2735 - DNA, 51 bp, Homo sapiens
ctcctaacttaacggccattactttkgtcactgattatatcacttctaacc

SEQ ID NO: 2736 - DNA, 51 bp, Homo sapiens; identical to SEQ ID NO: 1695

SEQ ID NO: 2737 - DNA, 51 bp, Homo sapiens
agggactcaatggcgtgcacaaggtycttctgctgcccttccacctggttc

SEQ ID NO: 2738 - DNA, 51 bp, Homo sapiens; identical to SEQ ID NO: 1603

SEQ ID NO: 2739 - DNA, 51 bp, Homo sapiens; identical to SEQ ID NO: 1371

SEQ ID NO: 2740 - DNA, 51 bp, Homo sapiens
attcatagactcaaccaattttgccyaatttttctctaggactattaaaat

SEQ ID NO: 2741 - DNA, 51 bp, Homo sapiens
ttttaaaaaggtgaaaacagtttgayggaacagtaaaaggaagaattaaag

SEQ ID NO: 2742 - DNA, 51 bp, Homo sapiens; identical to SEQ ID NO: 1901

SEQ ID NO: 2743 - DNA, 51 bp, Homo sapiens; identical to SEQ ID NO: 900

SEQ ID NO: 2744 - DNA, 51 bp, Homo sapiens; identical to SEQ ID NO: 97

SEQ ID NO: 2745 - DNA, 51 bp, Homo sapiens; identical to SEQ ID NO: 1645

SEQ ID NO: 2746 - DNA, 51 bp, Homo sapiens; identical to SEQ ID NO: 1788

SEQ ID NO: 2747 - DNA, 51 bp, Homo sapiens
gcataatagaaataggaattaaactyacctgaggagcagaagcgaggaagc

SEQ ID NO: 2748 - DNA, 51 bp, Homo sapiens; identical to SEQ ID NO: 58

SEQ ID NO: 2749 - DNA, 51 bp, Homo sapiens
aactattctgatggcattcccagtakctccttccagtgaacgttagctatc

SEQ ID NO: 2750 - DNA, 51 bp, Homo sapiens
acagataaaagatgtaagtagacagyttgaggtttcagagtccctcctgca

SEQ ID NO: 2751 - DNA, 51 bp, Homo sapiens; identical to SEQ ID NO: 167

SEQ ID NO: 2752 - DNA, 51 bp, Homo sapiens
tcaagtttcaatgtaatcactaagcscttgattctaacaaatcctcacttc

SEQ ID NO: 2753 - DNA, 51 bp, Homo sapiens; identical to SEQ ID NO: 2431

SEQ ID NO: 2754 - DNA, 51 bp, Homo sapiens; identical to SEQ ID NO: 2520

SEQ ID NO: 2755 - DNA, 51 bp, Homo sapiens; identical to SEQ ID NO: 592

SEQ ID NO: 2756 - DNA, 51 bp, Homo sapiens
acaatgtatggtaaacacaagtccayagaaccttcttagtaagttaaagtt

SEQ ID NO: 2757 - DNA, 51 bp, Homo sapiens; identical to SEQ ID NO: 336

SEQ ID NO: 2758 - DNA, 51 bp, Homo sapiens
atagtatataagcttgaggatgaggkaattctcaaaatgatgatgaagggg

SEQ ID NO: 2759 - DNA, 51 bp, Homo sapiens; identical to SEQ ID NO: 61

SEQ ID NO: 2760 - DNA, 51 bp, Homo sapiens
attatctgacttggagttagctgttsctgaattctgtttatctcttctctg

SEQ ID NO: 2761 - DNA, 51 bp, Homo sapiens
ccagaaggcacctggcttttccattstctcccaagatgttcttacaggacc

SEQ ID NO: 2762 - DNA, 51 bp, Homo sapiens; identical to SEQ ID NO: 2430

SEQ ID NO: 2763 - DNA, 51 bp, Homo sapiens
gctgagaaatactgtgaaccaaaagrccgtcacttaccttttattataaat

SEQ ID NO: 2764 - DNA, 51 bp, Homo sapiens
cagcaagggtttgctgtggacatgasagttgctaactcctaggaggtccca

SEQ ID NO: 2765 - DNA, 51 bp, Homo sapiens; identical to SEQ ID NO: 741

SEQ ID NO: 2766 - DNA, 51 bp, Homo sapiens
aataatgtggctttcataatatccayggagatacagagaagtggatagttc

SEQ ID NO: 2767 - DNA, 51 bp, Homo sapiens; identical to SEQ ID NO: 248

SEQ ID NO: 2768 - DNA, 51 bp, Homo sapiens; identical to SEQ ID NO: 52

SEQ ID NO: 2769 - DNA, 51 bp, Homo sapiens; identical to SEQ ID NO: 369

SEQ ID NO: 2770 - DNA, 51 bp, Homo sapiens; identical to SEQ ID NO: 1109

SEQ ID NO: 2771 - DNA, 51 bp, Homo sapiens
tccgttggtgacctccctggctgcaktcccaggctcaagcctcatcttttt

SEQ ID NO: 2772 - DNA, 51 bp, Homo sapiens; identical to SEQ ID NO: 787

SEQ ID NO: 2773 - DNA, 51 bp, Homo sapiens
caggagggctacccatcacaattccyggtgtcacatgcagagcccagcaca

SEQ ID NO: 2774 - DNA, 51 bp, Homo sapiens; identical to SEQ ID NO: 160

SEQ ID NO: 2775 - DNA, 51 bp, Homo sapiens; identical to SEQ ID NO: 2238

SEQ ID NO: 2776 - DNA, 51 bp, Homo sapiens
gcgaataaaataacaagtcacatcargaagttgtggcctgatttaaaacaa

SEQ ID NO: 2777 - DNA, 51 bp, Homo sapiens; identical to SEQ ID NO: 105

SEQ ID NO: 2778 - DNA, 51 bp, Homo sapiens
caccctggtggccagagtctgaaacyggttgttccagtaggtatcctgctg

SEQ ID NO: 2779 - DNA, 51 bp, Homo sapiens; identical to SEQ ID NO: 878

SEQ ID NO: 2780 - DNA, 51 bp, Homo sapiens; identical to SEQ ID NO: 387

SEQ ID NO: 2781 - DNA, 51 bp, Homo sapiens
actatgccctcccactggttcttaastggggcaacatcactttactgggag

SEQ ID NO: 2782 - DNA, 51 bp, Homo sapiens; identical to SEQ ID NO: 2098

SEQ ID NO: 2783 - DNA, 51 bp, Homo sapiens; identical to SEQ ID NO: 251

SEQ ID NO: 2784 - DNA, 51 bp, Homo sapiens
cagcctttgagctccatctgccgcayactcgggcacagctgccagtgcttc

SEQ ID NO: 2785 - DNA, 51 bp, Homo sapiens; identical to SEQ ID NO: 1092

SEQ ID NO: 2786 - DNA, 51 bp, Homo sapiens; identical to SEQ ID NO: 711

SEQ ID NO: 2787 - DNA, 51 bp, Homo sapiens; identical to SEQ ID NO: 1459

SEQ ID NO: 2788 - DNA, 51 bp, Homo sapiens
cagctcctcattactgcattccctcrggcaggatccaacctctctgacccc

SEQ ID NO: 2789 - DNA, 51 bp, Homo sapiens; identical to SEQ ID NO: 2340

SEQ ID NO: 2790 - DNA, 51 bp, Homo sapiens; identical to SEQ ID NO: 100

SEQ ID NO: 2791 - DNA, 51 bp, Homo sapiens; identical to SEQ ID NO: 417

SEQ ID NO: 2792 - DNA, 51 bp, Homo sapiens
tactatgaaaagatcttcagcacccyggaggcacctggggagcacggcctg

SEQ ID NO: 2793 - DNA, 51 bp, Homo sapiens; identical to SEQ ID NO: 1260

SEQ ID NO: 2794 - DNA, 51 bp, Homo sapiens
cagtttgggaagaattctgggagtasactcagagtaaactttcaacaaggc

SEQ ID NO: 2795 - DNA, 51 bp, Homo sapiens
gaaaggaatagtaatgattgttgatktttacattgaagaaatcttgtgaca

SEQ ID NO: 2796 - DNA, 51 bp, Homo sapiens
aagctactcagctatgggagtttatstgaagccctcgcacagcctagacag

SEQ ID NO: 2797 - DNA, 51 bp, Homo sapiens; identical to SEQ ID NO: 6

SEQ ID NO: 2798 - DNA, 51 bp, Homo sapiens; identical to SEQ ID NO: 930

SEQ ID NO: 2799 - DNA, 51 bp, Homo sapiens
gttccaagtgcacaccctttctactrtactatcacagcctcttgtttccct

SEQ ID NO: 2800 - DNA, 51 bp, Homo sapiens
atgcaaactgctttctttgaggtctkgagcaaagtactactcacaaatcca

SEQ ID NO: 2801 - DNA, 51 bp, Homo sapiens
tggcatattggcagcctactaaccaytgggtacttcttgggaccctcttca

SEQ ID NO: 2802 - DNA, 51 bp, Homo sapiens; identical to SEQ ID NO: 764

SEQ ID NO: 2803 - DNA, 51 bp, Homo sapiens
ctagatgcctgtgtctggttagaacmactgcatgctttctttcagtgagta

SEQ ID NO: 2804 - DNA, 51 bp, Homo sapiens
actcctgagcttaaaataatctcaamaagtcaaacaggtctaagtgaacct

SEQ ID NO: 2805 - DNA, 51 bp, Homo sapiens; identical to SEQ ID NO: 650

SEQ ID NO: 2806 - DNA, 51 bp, Homo sapiens
ctatactttctcaaaccatttctgcrtgtatagtacctcctttgtttcttg

SEQ ID NO: 2807 - DNA, 51 bp, Homo sapiens; identical to SEQ ID NO: 398

SEQ ID NO: 2808 - DNA, 51 bp, Homo sapiens; identical to SEQ ID NO: 223

SEQ ID NO: 2809 - DNA, 51 bp, Homo sapiens; identical to SEQ ID NO: 1225

SEQ ID NO: 2810 - DNA, 51 bp, Homo sapiens; identical to SEQ ID NO: 3

SEQ ID NO: 2811 - DNA, 51 bp, Homo sapiens
ctttggacatcggtggtgctgaccakgaattctttgtggacattggcccag

SEQ ID NO: 2812 - DNA, 51 bp, Homo sapiens; identical to SEQ ID NO: 2100

SEQ ID NO: 2813 - DNA, 51 bp, Homo sapiens; identical to SEQ ID NO: 1238

SEQ ID NO: 2814 - DNA, 51 bp, Homo sapiens; identical to SEQ ID NO: 68

SEQ ID NO: 2815 - DNA, 51 bp, Homo sapiens; identical to SEQ ID NO: 1112

SEQ ID NO: 2816 - DNA, 51 bp, Homo sapiens
acagaaacatgtgaaaaaatagtatycataatcccatcacccaaacccact

SEQ ID NO: 2817 - DNA, 51 bp, Homo sapiens; identical to SEQ ID NO: 5

SEQ ID NO: 2818 - DNA, 51 bp, Homo sapiens
tggccccagacacagacctggttccyttctcaacttcatcttgatcttgat

SEQ ID NO: 2819 - DNA, 51 bp, Homo sapiens
tcccccaaaagcctggcattggctayacccacttctggttagaaccatctc

SEQ ID NO: 2820 - DNA, 51 bp, Homo sapiens
tttgacacaaggcaataacttccgcrtaatgagtacccaagaaagtagaac

SEQ ID NO: 2821 - DNA, 51 bp, Homo sapiens; identical to SEQ ID NO: 789

SEQ ID NO: 2822 - DNA, 51 bp, Homo sapiens; identical to SEQ ID NO: 1925

SEQ ID NO: 2823 - DNA, 51 bp, Homo sapiens
tgcttatggtacctccctcgttgccratacaggagacatttgcagattcta

SEQ ID NO: 2824 - DNA, 51 bp, Homo sapiens; identical to SEQ ID NO: 354

SEQ ID NO: 2825 - DNA, 51 bp, Homo sapiens; identical to SEQ ID NO: 43

SEQ ID NO: 2826 - DNA, 51 bp, Homo sapiens; identical to SEQ ID NO: 607

SEQ ID NO: 2827 - DNA, 51 bp, Homo sapiens; identical to SEQ ID NO: 2374

SEQ ID NO: 2828 - DNA, 51 bp, Homo sapiens
gtggaacagcaatatggcctcaggargtgaaaaccacagatgggtctagct

SEQ ID NO: 2829 - DNA, 51 bp, Homo sapiens; identical to SEQ ID NO: 627

SEQ ID NO: 2830 - DNA, 51 bp, Homo sapiens; identical to SEQ ID NO: 63

SEQ ID NO: 2831 - DNA, 51 bp, Homo sapiens; identical to SEQ ID NO: 1117

SEQ ID NO: 2832 - DNA, 51 bp, Homo sapiens; identical to SEQ ID NO: 2101

SEQ ID NO: 2833 - DNA, 51 bp, Homo sapiens; identical to SEQ ID NO: 256

SEQ ID NO: 2834 - DNA, 51 bp, Homo sapiens
cctggtatactatgtttctgtgtttrtcttcttccttcactaaaatataat

SEQ ID NO: 2835 - DNA, 51 bp, Homo sapiens; identical to SEQ ID NO: 2623

SEQ ID NO: 2836 - DNA, 51 bp, Homo sapiens; identical to SEQ ID NO: 937

SEQ ID NO: 2837 - DNA, 51 bp, Homo sapiens; identical to SEQ ID NO: 1162

SEQ ID NO: 2838 - DNA, 51 bp, Homo sapiens
ccggaggaggagaaactgaaaaggcratgccccagaggaagtgggagaggc

SEQ ID NO: 2839 - DNA, 51 bp, Homo sapiens
acctcttgttcctttggcacatctgyctcagtcttctctacttggccttct

SEQ ID NO: 2840 - DNA, 51 bp, Homo sapiens; identical to SEQ ID NO: 1851

SEQ ID NO: 2841 - DNA, 51 bp, Homo sapiens; identical to SEQ ID NO: 2656

SEQ ID NO: 2842 - DNA, 51 bp, Homo sapiens
ccaaattctaagacaatgcttctccrtgtcaggagagttctgtgtaaaagg

SEQ ID NO: 2843 - DNA, 51 bp, Homo sapiens
gagaggctgatggaaactatgtgccygtgataacgtagctgaacagcagtc

SEQ ID NO: 2844 - DNA, 51 bp, Homo sapiens
gtgtgacgacagtgtctgaacagttmtccctccggcagtgacgagcagccc

SEQ ID NO: 2845 - DNA, 51 bp, Homo sapiens; identical to SEQ ID NO: 236

SEQ ID NO: 2846 - DNA, 51 bp, Homo sapiens
cctcctgttccttgcaactatatgtrggtatagagtagtgtgctctcagcg

SEQ ID NO: 2847 - DNA, 51 bp, Homo sapiens
agagaagttcttctaacttgcatttytcataacattgaaaaggtcctcaca

SEQ ID NO: 2848 - DNA, 51 bp, Homo sapiens; identical to SEQ ID NO: 411

SEQ ID NO: 2849 - DNA, 51 bp, Homo sapiens; identical to SEQ ID NO: 682

SEQ ID NO: 2850 - DNA, 51 bp, Homo sapiens; identical to SEQ ID NO: 2092

SEQ ID NO: 2851 - DNA, 51 bp, Homo sapiens
gatcatgcttcccatatatttgaagscagtcaaactcttgttcaaatacta

SEQ ID NO: 2852 - DNA, 51 bp, Homo sapiens
acctctgctgccgaccagcatctacscggtaccttccctggagccacactt

SEQ ID NO: 2853 - DNA, 51 bp, Homo sapiens; identical to SEQ ID NO: 2504

SEQ ID NO: 2854 - DNA, 51 bp, Homo sapiens
tggagtgactggttgaatcctctttyaggagccttaaattgtccttactct

SEQ ID NO: 2855 - DNA, 51 bp, Homo sapiens
aaaatttctcttggctcttgtggacygtatgtatgttgagttccactccaa

SEQ ID NO: 2856 - DNA, 51 bp, Homo sapiens
agtcctcacttcattaaagagatcartcctcagaccaccatcatccaagta

SEQ ID NO: 2857 - DNA, 51 bp, Homo sapiens; identical to SEQ ID NO: 836

SEQ ID NO: 2858 - DNA, 51 bp, Homo sapiens
agataatatttaaaaagtttcattcygggaggcttggaactatagagatag

SEQ ID NO: 2859 - DNA, 51 bp, Homo sapiens
tcttatttggcagctttggtaacctmaggaacaactcagcctcgtaatgtc

SEQ ID NO: 2860 - DNA, 51 bp, Homo sapiens; identical to SEQ ID NO: 2546

SEQ ID NO: 2861 - DNA, 51 bp, Homo sapiens; identical to SEQ ID NO: 235

SEQ ID NO: 2862 - DNA, 51 bp, Homo sapiens; identical to SEQ ID NO: 2538

SEQ ID NO: 2863 - DNA, 51 bp, Homo sapiens
ccttaggccaaccttggaggatgctragtttggttttattaagggggtaag

SEQ ID NO: 2864 - DNA, 51 bp, Homo sapiens; identical to SEQ ID NO: 2272

SEQ ID NO: 2865 - DNA, 51 bp, Homo sapiens; identical to SEQ ID NO: 449

SEQ ID NO: 2866 - DNA, 51 bp, Homo sapiens; identical to SEQ ID NO: 547

SEQ ID NO: 2867 - DNA, 51 bp, Homo sapiens; identical to SEQ ID NO: 1193

SEQ ID NO: 2868 - DNA, 51 bp, Homo sapiens; identical to SEQ ID NO: 294

SEQ ID NO: 2869 - DNA, 51 bp, Homo sapiens; identical to SEQ ID NO: 2458

SEQ ID NO: 2870 - DNA, 51 bp, Homo sapiens; identical to SEQ ID NO: 794

SEQ ID NO: 2871 - DNA, 51 bp, Homo sapiens
ttcattcaatcttttagatgtctctytgtaccaattaaagaatgcatctca

SEQ ID NO: 2872 - DNA, 51 bp, Homo sapiens
catgactaaaattagctaaaacttasgaattagattagaaaaacagataca

SEQ ID NO: 2873 - DNA, 51 bp, Homo sapiens
caagaaacacctccaagctgaacctsaatgtagctccagattctcatggga

SEQ ID NO: 2874 - DNA, 51 bp, Homo sapiens
tgtttttagaccagtactttaataaytttatagacgaatatgttgttctat

SEQ ID NO: 2875 - DNA, 51 bp, Homo sapiens; identical to SEQ ID NO: 1593

SEQ ID NO: 2876 - DNA, 51 bp, Homo sapiens; identical to SEQ ID NO: 173

SEQ ID NO: 2877 - DNA, 51 bp, Homo sapiens
agaattatgatcagttttcattagtsagattttattgtacttcaaaagaca

SEQ ID NO: 2878 - DNA, 51 bp, Homo sapiens
atactttatggttgtgtttttaatcrtagctctttactacatctagaatga

SEQ ID NO: 2879 - DNA, 51 bp, Homo sapiens; identical to SEQ ID NO: 1605

SEQ ID NO: 2880 - DNA, 51 bp, Homo sapiens; identical to SEQ ID NO: 1150

SEQ ID NO: 2881 - DNA, 51 bp, Homo sapiens
tgtatttaacatgggtaaatataaarctccagaaaagctcatgttttatta

SEQ ID NO: 2882 - DNA, 51 bp, Homo sapiens; identical to SEQ ID NO: 1198

SEQ ID NO: 2883 - DNA, 51 bp, Homo sapiens; identical to SEQ ID NO: 2145

SEQ ID NO: 2884 - DNA, 51 bp, Homo sapiens
gttctacagtgagccttctctctgcrcagtgagtctcaaaggagccaatta

SEQ ID NO: 2885 - DNA, 51 bp, Homo sapiens
ccaatactattagttgaagttcccaratacatgatagcctgcttttgtgcc

SEQ ID NO: 2886 - DNA, 51 bp, Homo sapiens
ctacatatacttacctcggttatcayatgaagtgtctagagaattgaagaa

SEQ ID NO: 2887 - DNA, 51 bp, Homo sapiens; identical to SEQ ID NO: 187

SEQ ID NO: 2888 - DNA, 51 bp, Homo sapiens
accatataggacagaggattctatasgagctttgtggcaggcccattctta

SEQ ID NO: 2889 - DNA, 51 bp, Homo sapiens; identical to SEQ ID NO: 438

SEQ ID NO: 2890 - DNA, 51 bp, Homo sapiens; identical to SEQ ID NO: 2379

SEQ ID NO: 2891 - DNA, 51 bp, Homo sapiens; identical to SEQ ID NO: 2461

SEQ ID NO: 2892 - DNA, 51 bp, Homo sapiens
tgtgggacaagtatcttcctcagaawcctaaaatatcacaaatgatattaa

SEQ ID NO: 2893 - DNA, 51 bp, Homo sapiens
ttataggcataatttctaactctcawttaagtgaggcagttatcaatgttg

SEQ ID NO: 2894 - DNA, 51 bp, Homo sapiens; identical to SEQ ID NO: 128

SEQ ID NO: 2895 - DNA, 51 bp, Homo sapiens; identical to SEQ ID NO: 1274

SEQ ID NO: 2896 - DNA, 51 bp, Homo sapiens; identical to SEQ ID NO: 266

SEQ ID NO: 2897 - DNA, 51 bp, Homo sapiens
catccccatcactgttgtggaagatyagcgagacataaagtgcctgtcagg

SEQ ID NO: 2898 - DNA, 51 bp, Homo sapiens; identical to SEQ ID NO: 1625

SEQ ID NO: 2899 - DNA, 51 bp, Homo sapiens
aaaaggttgattctgagatttcctaygatggaagtgtgggaaaaagttagg

SEQ ID NO: 2900 - DNA, 51 bp, Homo sapiens
ccttcgaaagcctgaaaaacatcccraaagatataagaacaataatgaaag

SEQ ID NO: 2901 - DNA, 51 bp, Homo sapiens
tctcaccaatgtctcctttgcccccrgggtagaacactgaggaattggttt

SEQ ID NO: 2902 - DNA, 51 bp, Homo sapiens
caggtgtcaatcctcagagcacttcrtgataaacatcctgcacaccaatct

SEQ ID NO: 2903 - DNA, 51 bp, Homo sapiens
cttttctcaggactaacctagagtcrtttttgttagttcattgagataact

SEQ ID NO: 2904 - DNA, 51 bp, Homo sapiens; identical to SEQ ID NO: 2429

SEQ ID NO: 2905 - DNA, 51 bp, Homo sapiens; identical to SEQ ID NO: 648

SEQ ID NO: 2906 - DNA, 51 bp, Homo sapiens; identical to SEQ ID NO: 1047

SEQ ID NO: 2907 - DNA, 51 bp, Homo sapiens; identical to SEQ ID NO: 1569

SEQ ID NO: 2908 - DNA, 51 bp, Homo sapiens; identical to SEQ ID NO: 1564

SEQ ID NO: 2909 - DNA, 51 bp, Homo sapiens
tgtttatgttaatagcagccgtttargagtaggtttctaaagcactgcatg

SEQ ID NO: 2910 - DNA, 51 bp, Homo sapiens
agacttgagacggcataacctggtgktgagtctctgtgtcatatatgctca

SEQ ID NO: 2911 - DNA, 51 bp, Homo sapiens
atgaactattctcaagaacaatatcygcacattagccattgagtgccaata

SEQ ID NO: 2912 - DNA, 51 bp, Homo sapiens
gaatctgaatttggtgactgaggtcytcattttggagttaagattttttta

SEQ ID NO: 2913 - DNA, 51 bp, Homo sapiens
cctttgacctcttggcctcatcagaytcattcataaaaactttgcccaggg

SEQ ID NO: 2914 - DNA, 51 bp, Homo sapiens; identical to SEQ ID NO: 29

SEQ ID NO: 2915 - DNA, 51 bp, Homo sapiens
cccacctgcactcccagtccttttakgctcaccttcaattcatatgtctat

SEQ ID NO: 2916 - DNA, 51 bp, Homo sapiens
ccatttctgaaaaaactggaaggaaytgagatggaaaagtaataatgtaat

SEQ ID NO: 2917 - DNA, 51 bp, Homo sapiens
tagctatcaatttgactaaattttgrtacttcaataacctattgcattgtc

SEQ ID NO: 2918 - DNA, 51 bp, Homo sapiens
gatgtcatatgttttatcctggtttmtttcaggtaagtcttttcaaggaca

SEQ ID NO: 2919 - DNA, 51 bp, Homo sapiens; identical to SEQ ID NO: 2449

SEQ ID NO: 2920 - DNA, 51 bp, Homo sapiens; identical to SEQ ID NO: 1580

SEQ ID NO: 2921 - DNA, 51 bp, Homo sapiens
tcagtcacacaactgttctgatgaaycccgaactgaactctttgtctcatt

SEQ ID NO: 2922 - DNA, 51 bp, Homo sapiens; identical to SEQ ID NO: 257

SEQ ID NO: 2923 - DNA, 51 bp, Homo sapiens
tctacctggtggtctctgtccgggcygggaaaacagactctcagtggtgtt

SEQ ID NO: 2924 - DNA, 51 bp, Homo sapiens
atggcaattctaatagctatctgtayaatgcaaactttactaagctactac

SEQ ID NO: 2925 - DNA, 51 bp, Homo sapiens
ttgttctcttgaatgaacttcataawctttaaggagaggggctatcaccca

SEQ ID NO: 2926 - DNA, 51 bp, Homo sapiens; identical to SEQ ID NO: 2405

SEQ ID NO: 2927 - DNA, 51 bp, Homo sapiens; identical to SEQ ID NO: 1638

SEQ ID NO: 2928 - DNA, 51 bp, Homo sapiens
ggacaaagttagtaacctaggaaccytgcctatagggaacgagagcagcca

SEQ ID NO: 2929 - DNA, 51 bp, Homo sapiens
tgcaatcctcgcaaagttaggcggaycaaaccattccagaaagcagctggt

SEQ ID NO: 2930 - DNA, 51 bp, Homo sapiens; identical to SEQ ID NO: 225

SEQ ID NO: 2931 - DNA, 51 bp, Homo sapiens; identical to SEQ ID NO: 129

SEQ ID NO: 2932 - DNA, 51 bp, Homo sapiens
tcaactctgtatcccagccttaatawtttttttattcagacaagaatctaa

SEQ ID NO: 2933 - DNA, 51 bp, Homo sapiens
aaccattggccaaataaaataattcrccaacttcaataatccagacaaata

SEQ ID NO: 2934 - DNA, 51 bp, Homo sapiens
acaagctgataattaccatcattttsgaattgttcagaaccatgaagaata

SEQ ID NO: 2935 - DNA, 51 bp, Homo sapiens; identical to SEQ ID NO: 859

SEQ ID NO: 2936 - DNA, 51 bp, Homo sapiens
ccagagcagttagttcaaaccctccrgtgagcacctgcaacttgcctagca

SEQ ID NO: 2937 - DNA, 51 bp, Homo sapiens
cctgtaggatactgaggaaagccacygacatttcgtggcacggctgacccg

SEQ ID NO: 2938 - DNA, 51 bp, Homo sapiens; identical to SEQ ID NO: 2437

SEQ ID NO: 2939 - DNA, 51 bp, Homo sapiens
cgtgcttcctccacaaaaccgtgaamagtatgaaaagtcagtcattggctc

SEQ ID NO: 2940 - DNA, 51 bp, Homo sapiens
gtgattcacatatgtgcttcagaaayatgacaaatctactacatgtttgat

SEQ ID NO: 2941 - DNA, 51 bp, Homo sapiens; identical to SEQ ID NO: 21

SEQ ID NO: 2942 - DNA, 51 bp, Homo sapiens
tgtcacttccaaggaactaggttggwgtgtggacatcacagcacgttatag

SEQ ID NO: 2943 - DNA, 51 bp, Homo sapiens; identical to SEQ ID NO: 1269

SEQ ID NO: 2944 - DNA, 51 bp, Homo sapiens
ctctcacattgcccctaatgcctgcrggttccaagcctgaagctgattctc

SEQ ID NO: 2945 - DNA, 51 bp, Homo sapiens
tgcaaagaaaggtggaagtttgcgckctgtaaagaagttacagataatcct

SEQ ID NO: 2946 - DNA, 51 bp, Homo sapiens; identical to SEQ ID NO: 2058

SEQ ID NO: 2947 - DNA, 51 bp, Homo sapiens; identical to SEQ ID NO: 2356

SEQ ID NO: 2948 - DNA, 51 bp, Homo sapiens
ttgtcaaacaaaattctaaattccarttgttatagactaaatgctgtgtgc

SEQ ID NO: 2949 - DNA, 51 bp, Homo sapiens; identical to SEQ ID NO: 229

SEQ ID NO: 2950 - DNA, 51 bp, Homo sapiens; identical to SEQ ID NO: 1298

SEQ ID NO: 2951 - DNA, 51 bp, Homo sapiens
aagctaggtggcaaaggttaactagyatgtaacttgaaattttattaggag

SEQ ID NO: 2952 - DNA, 51 bp, Homo sapiens; identical to SEQ ID NO: 1814

SEQ ID NO: 2953 - DNA, 51 bp, Homo sapiens
ttaacttggcagcatgagaacctccrtacacaacctgacaagaaagacatg

SEQ ID NO: 2954 - DNA, 51 bp, Homo sapiens; identical to SEQ ID NO: 2373

SEQ ID NO: 2955 - DNA, 51 bp, Homo sapiens
aatgttggaaattccagagtgccagsgtcctaggaagggatgatttctggt

SEQ ID NO: 2956 - DNA, 51 bp, Homo sapiens
gatgtgaatccacctgtcacatattsattacattcaggcaataacagggtg

SEQ ID NO: 2957 - DNA, 51 bp, Homo sapiens
actccagtcagagcagctcacctgcrcagaaaaatgagggttcagctttta

SEQ ID NO: 2958 - DNA, 51 bp, Homo sapiens; identical to SEQ ID NO: 1716

SEQ ID NO: 2959 - DNA, 51 bp, Homo sapiens; identical to SEQ ID NO: 1869

SEQ ID NO: 2960 - DNA, 51 bp, Homo sapiens
gtagttgaagtctagaaagttggagrctagaaagtatggaccaaaaacaca

SEQ ID NO: 2961 - DNA, 51 bp, Homo sapiens
tgccagttactcttgatcacataacyctttatttacttaacagtagtgatt

SEQ ID NO: 2962 - DNA, 51 bp, Homo sapiens; identical to SEQ ID NO: 2628

SEQ ID NO: 2963 - DNA, 51 bp, Homo sapiens; identical to SEQ ID NO: 677

SEQ ID NO: 2964 - DNA, 51 bp, Homo sapiens; identical to SEQ ID NO: 2338

SEQ ID NO: 2965 - DNA, 51 bp, Homo sapiens; identical to SEQ ID NO: 569

SEQ ID NO: 2966 - DNA, 51 bp, Homo sapiens; identical to SEQ ID NO: 230

SEQ ID NO: 2967 - DNA, 51 bp, Homo sapiens
tgagtgagaattaagttgtctgatayataataagcataatccaaattgtag

SEQ ID NO: 2968 - DNA, 51 bp, Homo sapiens; identical to SEQ ID NO: 2368

SEQ ID NO: 2969 - DNA, 51 bp, Homo sapiens; identical to SEQ ID NO: 154

SEQ ID NO: 2970 - DNA, 51 bp, Homo sapiens
agttgctgacctgaacatgcttaatratttttctcaaataacacccagtag

SEQ ID NO: 2971 - DNA, 51 bp, Homo sapiens; identical to SEQ ID NO: 885

SEQ ID NO: 2972 - DNA, 51 bp, Homo sapiens; identical to SEQ ID NO: 723

SEQ ID NO: 2973 - DNA, 51 bp, Homo sapiens; identical to SEQ ID NO: 1977

SEQ ID NO: 2974 - DNA, 51 bp, Homo sapiens
ttgtgtttaggatcatctctgcaggyttcctaggtctgaatctgcgagtag

SEQ ID NO: 2975 - DNA, 51 bp, Homo sapiens; identical to SEQ ID NO: 2170

SEQ ID NO: 2976 - DNA, 51 bp, Homo sapiens; identical to SEQ ID NO: 1979

SEQ ID NO: 2977 - DNA, 51 bp, Homo sapiens
gtgcctttattcaggctgggagccaygctgggaacttctgggagcagggcc

SEQ ID NO: 2978 - DNA, 51 bp, Homo sapiens
caatgacacattcatagattaaaaaygtgcagccgctatgatttcttacca

SEQ ID NO: 2979 - DNA, 51 bp, Homo sapiens
cagccacaccttgatttgagtccctyttctgttacctactaccatctttgt

SEQ ID NO: 2980 - DNA, 51 bp, Homo sapiens; identical to SEQ ID NO: 184

SEQ ID NO: 2981 - DNA, 51 bp, Homo sapiens; identical to SEQ ID NO: 33

SEQ ID NO: 2982 - DNA, 51 bp, Homo sapiens
ataaaagactgtacttactgtgacaktcccccagaccatctgtattgccac

SEQ ID NO: 2983 - DNA, 51 bp, Homo sapiens; identical to SEQ ID NO: 631

SEQ ID NO: 2984 - DNA, 51 bp, Homo sapiens; identical to SEQ ID NO: 397

SEQ ID NO: 2985 - DNA, 51 bp, Homo sapiens
ccatgtttctgctgcttgtttcaagyggaagctgttgttcaggaatccaga

SEQ ID NO: 2986 - DNA, 51 bp, Homo sapiens
cacgtgtaatcttttaaaatacaaayatggttaagctacttagttgttgac

SEQ ID NO: 2987 - DNA, 51 bp, Homo sapiens
ccttttctaaggccattttaataacrgcattgtgggacaagtatcttcctc

SEQ ID NO: 2988 - DNA, 51 bp, Homo sapiens; identical to SEQ ID NO: 2048

SEQ ID NO: 2989 - DNA, 51 bp, Homo sapiens
actctctactaaaccctggagatacygcagaaaacaaaaccagcaaactcc

SEQ ID NO: 2990 - DNA, 51 bp, Homo sapiens
agtactatggtaatgggtgcaatacrgattgttatcctaatgcactatctt

SEQ ID NO: 2991 - DNA, 51 bp, Homo sapiens; identical to SEQ ID NO: 1248

SEQ ID NO: 2992 - DNA, 51 bp, Homo sapiens
ctgtggttgatgaatcgggaatctcwggtgaataggaaaaattgttggatt

SEQ ID NO: 2993 - DNA, 51 bp, Homo sapiens; identical to SEQ ID NO: 1523

SEQ ID NO: 2994 - DNA, 51 bp, Homo sapiens
agaatgcacacagattgtgacagaarcatgtatattaagagacttgtaaca

SEQ ID NO: 2995 - DNA, 51 bp, Homo sapiens
gcatcctgggaggttttatccttggygactctaatggtagatttttgtcca

SEQ ID NO: 2996 - DNA, 51 bp, Homo sapiens
gggatggtcagggaaatgaaaataaygcatgactatctgattgccccaaac

SEQ ID NO: 2997 - DNA, 51 bp, Homo sapiens; identical to SEQ ID NO: 2442

SEQ ID NO: 2998 - DNA, 51 bp, Homo sapiens; identical to SEQ ID NO: 1

SEQ ID NO: 2999 - DNA, 51 bp, Homo sapiens
atgaatcttagaccaaagagtgtaayatgcaaaaaaaaattttctgtattg

SEQ ID NO: 3000 - DNA, 51 bp, Homo sapiens
gggggcgtggccgcgctgtgccgggmggaccctacccgttcattggcggga

SEQ ID NO: 3001 - DNA, 51 bp, Homo sapiens
gacaatgggttgggtaattcactacmtcacataataatctgataggcaagt

SEQ ID NO: 3002 - DNA, 51 bp, Homo sapiens
atattagtgatggcttttaaagttcwcacagacaggcatctctctgaaaga

SEQ ID NO: 3003 - DNA, 51 bp, Homo sapiens; identical to SEQ ID NO: 2624

SEQ ID NO: 3004 - DNA, 51 bp, Homo sapiens; identical to SEQ ID NO: 1644

SEQ ID NO: 3005 - DNA, 51 bp, Homo sapiens
tcattaagtcacaatttaatttgtaytctttcggaaattcttttctggttt

SEQ ID NO: 3006 - DNA, 51 bp, Homo sapiens
tttgcccaagttcagatcaacaaacrtgggtgccaggcctatgatgggtgc

SEQ ID NO: 3007 - DNA, 51 bp, Homo sapiens
gaacacagctctaggctttggtgcartctccatcactatttccccagaaca

SEQ ID NO: 3008 - DNA, 51 bp, Homo sapiens
aatgatacagtattttcctacaaacycagtgcaatgtggatttggactgaa

SEQ ID NO: 3009 - DNA, 51 bp, Homo sapiens; identical to SEQ ID NO: 529

SEQ ID NO: 3010 - DNA, 51 bp, Homo sapiens; identical to SEQ ID NO: 2516

SEQ ID NO: 3011 - DNA, 51 bp, Homo sapiens
gtatgtagacaatacctgaacctccyttttaatacttcggatgcgaacatc

SEQ ID NO: 3012 - DNA, 51 bp, Homo sapiens
cctctgaaagaattcaagatattccrtgctgaaatgattaacaacaatgtg

SEQ ID NO: 3013 - DNA, 51 bp, Homo sapiens
cctcggttgttacaattgtctacacrtggagaactaatagcattcaccacc

SEQ ID NO: 3014 - DNA, 51 bp, Homo sapiens
tttagaatctggattttggaacaagrtttttttgcaagttcttcatccatg

SEQ ID NO: 3015 - DNA, 51 bp, Homo sapiens; identical to SEQ ID NO: 87

SEQ ID NO: 3016 - DNA, 51 bp, Homo sapiens; identical to SEQ ID NO: 843

SEQ ID NO: 3017 - DNA, 51 bp, Homo sapiens
cacgaacttggactgagccactcccrggttctgtgacagactgtggagtct

SEQ ID NO: 3018 - DNA, 51 bp, Homo sapiens; identical to SEQ ID NO: 23

SEQ ID NO: 3019 - DNA, 51 bp, Homo sapiens
tgtccttccctgtgtcattgaaatcrggtatggcggtgggattcgcttggg

SEQ ID NO: 3020 - DNA, 51 bp, Homo sapiens; identical to SEQ ID NO: 2648

SEQ ID NO: 3021 - DNA, 51 bp, Homo sapiens
attgaaaccattggagaagagccatytcaaataaatctgccaagtatccta

SEQ ID NO: 3022 - DNA, 51 bp, Homo sapiens; identical to SEQ ID NO: 147

SEQ ID NO: 3023 - DNA, 51 bp, Homo sapiens; identical to SEQ ID NO: 819

SEQ ID NO: 3024 - DNA, 51 bp, Homo sapiens
tggtatctggaacaatgcctgcaacrtaagtgttacttattattatgacta

SEQ ID NO: 3025 - DNA, 51 bp, Homo sapiens
tcagccccagaggtaacccaactttkgggaacactgaaacctcactatatc

SEQ ID NO: 3026 - DNA, 51 bp, Homo sapiens; identical to SEQ ID NO: 1283

SEQ ID NO: 3027 - DNA, 51 bp, Homo sapiens; identical to SEQ ID NO: 581

SEQ ID NO: 3028 - DNA, 51 bp, Homo sapiens
gaaaaggccagcatctgggatgccartttgagcaggacatggcagtaatta

SEQ ID NO: 3029 - DNA, 51 bp, Homo sapiens
ccacattcctaccttttggcccagargtcccatttctgaaattttatcctg

SEQ ID NO: 3030 - DNA, 51 bp, Homo sapiens; identical to SEQ ID NO: 1595

SEQ ID NO: 3031 - DNA, 51 bp, Homo sapiens
tcagcacagttcaaactccacctacrgaaccacaagcagcagtctccgagc

SEQ ID NO: 3032 - DNA, 51 bp, Homo sapiens
tgttctgaactgtatctggagatatrcatttctgtggaagaattaggcaaa

SEQ ID NO: 3033 - DNA, 51 bp, Homo sapiens; identical to SEQ ID NO: 1374

SEQ ID NO: 3034 - DNA, 51 bp, Homo sapiens
accctacttactatatccaggacatygtacttgccatttcacttgttgaca

SEQ ID NO: 3035 - DNA, 51 bp, Homo sapiens; identical to SEQ ID NO: 90

SEQ ID NO: 3036 - DNA, 51 bp, Homo sapiens; identical to SEQ ID NO: 1613

SEQ ID NO: 3037 - DNA, 51 bp, Homo sapiens
atcagaaatagaatgagaagtagcgwtcatctcagacatttgcctaaaata

SEQ ID NO: 3038 - DNA, 51 bp, Homo sapiens; identical to SEQ ID NO: 615

SEQ ID NO: 3039 - DNA, 51 bp, Homo sapiens; identical to SEQ ID NO: 608

SEQ ID NO: 3040 - DNA, 51 bp, Homo sapiens
cagaaatggaaaactttggaacaaamaagtcaacccatctgtgggaaaaga

SEQ ID NO: 3041 - DNA, 51 bp, Homo sapiens; identical to SEQ ID NO: 448

SEQ ID NO: 3042 - DNA, 51 bp, Homo sapiens; identical to SEQ ID NO: 80

SEQ ID NO: 3043 - DNA, 51 bp, Homo sapiens
aagtccagtaagtggctactgatatyggttccacaacttaatgacgttgag

SEQ ID NO: 3044 - DNA, 51 bp, Homo sapiens; identical to SEQ ID NO: 1343

SEQ ID NO: 3045 - DNA, 51 bp, Homo sapiens; identical to SEQ ID NO: 2086

SEQ ID NO: 3046 - DNA, 51 bp, Homo sapiens; identical to SEQ ID NO: 1718

SEQ ID NO: 3047 - DNA, 51 bp, Homo sapiens
gggggtggacatggggcacctctttygggctaggatgtcaggtctgatggc

SEQ ID NO: 3048 - DNA, 51 bp, Homo sapiens; identical to SEQ ID NO: 1123

SEQ ID NO: 3049 - DNA, 51 bp, Homo sapiens
tcaattgatactcactggagtgcccraactgctgtccacatctcatcttgg

SEQ ID NO: 3050 - DNA, 51 bp, Homo sapiens
ttcatctatcctatggatatttttcragccactgaacaatgccactaaata

SEQ ID NO: 3051 - DNA, 51 bp, Homo sapiens; identical to SEQ ID NO: 1692

SEQ ID NO: 3052 - DNA, 51 bp, Homo sapiens; identical to SEQ ID NO: 2308

SEQ ID NO: 3053 - DNA, 51 bp, Homo sapiens; identical to SEQ ID NO: 168

SEQ ID NO: 3054 - DNA, 51 bp, Homo sapiens
tgggagcacagagaaggagggaagcrtttcagccggaggaagccaggcaag

SEQ ID NO: 3055 - DNA, 51 bp, Homo sapiens; identical to SEQ ID NO: 953

SEQ ID NO: 3056 - DNA, 51 bp, Homo sapiens; identical to SEQ ID NO: 509

SEQ ID NO: 3057 - DNA, 51 bp, Homo sapiens
aatgccagtagtgagtcaatgcttayttaagcttattcagcacatttcatt

SEQ ID NO: 3058 - DNA, 51 bp, Homo sapiens; identical to SEQ ID NO: 1841

SEQ ID NO: 3059 - DNA, 51 bp, Homo sapiens; identical to SEQ ID NO: 942

SEQ ID NO: 3060 - DNA, 51 bp, Homo sapiens
caaatacagctcactaagtcctctcsttttcttttaaaaaccatacttcaa

SEQ ID NO: 3061 - DNA, 51 bp, Homo sapiens; identical to SEQ ID NO: 1290

SEQ ID NO: 3062 - DNA, 51 bp, Homo sapiens
tctgaattgggttcccaggtaaatgwtactattctgaaccagatcatggtt

SEQ ID NO: 3063 - DNA, 51 bp, Homo sapiens; identical to SEQ ID NO: 2576

SEQ ID NO: 3064 - DNA, 51 bp, Homo sapiens; identical to SEQ ID NO: 1347

SEQ ID NO: 3065 - DNA, 51 bp, Homo sapiens
ggtgacttctttatctgcttttgagyctttatctgagacatgggatgcagg

SEQ ID NO: 3066 - DNA, 51 bp, Homo sapiens; identical to SEQ ID NO: 20

SEQ ID NO: 3067 - DNA, 51 bp, Homo sapiens; identical to SEQ ID NO: 174

SEQ ID NO: 3068 - DNA, 51 bp, Homo sapiens; identical to SEQ ID NO: 881

SEQ ID NO: 3069 - DNA, 51 bp, Homo sapiens; identical to SEQ ID NO: 544

SEQ ID NO: 3070 - DNA, 51 bp, Homo sapiens
ttgtcacaaactatgtgtttttaccrtattccccagattccaaaagatggt

SEQ ID NO: 3071 - DNA, 51 bp, Homo sapiens; identical to SEQ ID NO: 2359

SEQ ID NO: 3072 - DNA, 51 bp, Homo sapiens
tttctccagcttgcatccttaatttrattagctaagagttgaaacatttgc

SEQ ID NO: 3073 - DNA, 51 bp, Homo sapiens
attccgggcttaacatcacaaaggaytgtcaccactcacatgaacacaggt

SEQ ID NO: 3074 - DNA, 51 bp, Homo sapiens
atggggtttacatcacattaaagacwtccctttgtagctcctatcaaaagg

SEQ ID NO: 3075 - DNA, 51 bp, Homo sapiens
tgaaggagcaggtcagaaagttgtcmaaacaggcatgacgaagggcagagg

SEQ ID NO: 3076 - DNA, 51 bp, Homo sapiens; identical to SEQ ID NO: 901

SEQ ID NO: 3077 - DNA, 51 bp, Homo sapiens; identical to SEQ ID NO: 1033

SEQ ID NO: 3078 - DNA, 51 bp, Homo sapiens; identical to SEQ ID NO: 2395

SEQ ID NO: 3079 - DNA, 51 bp, Homo sapiens; identical to SEQ ID NO: 646

SEQ ID NO: 3080 - DNA, 51 bp, Homo sapiens; identical to SEQ ID NO: 1742

SEQ ID NO: 3081 - DNA, 51 bp, Homo sapiens; identical to SEQ ID NO: 14

SEQ ID NO: 3082 - DNA, 51 bp, Homo sapiens
caatttccatttagatatttgcaacstggtataaataaaaatcattttcaa

SEQ ID NO: 3083 - DNA, 51 bp, Homo sapiens
acagcggtttaccttgacattatttytggtgtccagtcctgtcataaatct

SEQ ID NO: 3084 - DNA, 51 bp, Homo sapiens; identical to SEQ ID NO: 2508

SEQ ID NO: 3085 - DNA, 51 bp, Homo sapiens
acctttctaaatcaccagtggaacarctgagcaaaggaaaaatgatagcta

SEQ ID NO: 3086 - DNA, 51 bp, Homo sapiens
gtcctaagtagtgtattagaaagaaratgagctttggaagcagacagagct

SEQ ID NO: 3087 - DNA, 51 bp, Homo sapiens
cttcttagatgctaagccagtacccraaattattattctcttttgtaattc

SEQ ID NO: 3088 - DNA, 51 bp, Homo sapiens; identical to SEQ ID NO: 1263

SEQ ID NO: 3089 - DNA, 51 bp, Homo sapiens
agacttacagccatgtctttgataamaatggatgcaaaactgaaggaaatt

SEQ ID NO: 3090 - DNA, 51 bp, Homo sapiens; identical to SEQ ID NO: 587

SEQ ID NO: 3091 - DNA, 51 bp, Homo sapiens
cctaatcaagtccaaactccacctcrgaattcaagtacttccacaaaatga

SEQ ID NO: 3092 - DNA, 51 bp, Homo sapiens; identical to SEQ ID NO: 534

SEQ ID NO: 3093 - DNA, 51 bp, Homo sapiens
aatggggacctcctgttggaggacayagtctgttgcaataggtgaccactg

SEQ ID NO: 3094 - DNA, 51 bp, Homo sapiens; identical to SEQ ID NO: 707

SEQ ID NO: 3095 - DNA, 51 bp, Homo sapiens; identical to SEQ ID NO: 182

SEQ ID NO: 3096 - DNA, 51 bp, Homo sapiens
tgacccttctaatgcctttatcagakaggttctattattgctcttttttaa

SEQ ID NO: 3097 - DNA, 51 bp, Homo sapiens; identical to SEQ ID NO: 1362

SEQ ID NO: 3098 - DNA, 51 bp, Homo sapiens
catatattttttaaaggagctgtgcraagggcatacatgataagctattaa

SEQ ID NO: 3099 - DNA, 51 bp, Homo sapiens
actccacggactgcttaaatcagaakcagagttattaggatgaaccacagg

SEQ ID NO: 3100 - DNA, 51 bp, Homo sapiens
tctaaaactctaaagtgtaatgaccwtacaggtgatataaaatgtgcagct

SEQ ID NO: 3101 - DNA, 51 bp, Homo sapiens; identical to SEQ ID NO: 1735

SEQ ID NO: 3102 - DNA, 51 bp, Homo sapiens
cttctcaacggttacacgtaatccarctgccagtaagtgtctaactggatc

SEQ ID NO: 3103 - DNA, 51 bp, Homo sapiens; identical to SEQ ID NO: 93

SEQ ID NO: 3104 - DNA, 51 bp, Homo sapiens; identical to SEQ ID NO: 1499

SEQ ID NO: 3105 - DNA, 51 bp, Homo sapiens; identical to SEQ ID NO: 2176

SEQ ID NO: 3106 - DNA, 51 bp, Homo sapiens
gttgacctggataagctgttgcaacyaaaaaggccataacaggtaggtgtc

SEQ ID NO: 3107 - DNA, 51 bp, Homo sapiens; identical to SEQ ID NO: 201

SEQ ID NO: 3108 - DNA, 51 bp, Homo sapiens
tacagcaaacaactaaaaccacattmcccactatacaaacatattaataaa

SEQ ID NO: 3109 - DNA, 51 bp, Homo sapiens
ttgaaaagtgctctatctcaaaaccwctatgaattcctatgagcaaaataa

SEQ ID NO: 3110 - DNA, 51 bp, Homo sapiens; identical to SEQ ID NO: 176

SEQ ID NO: 3111 - DNA, 51 bp, Homo sapiens; identical to SEQ ID NO: 1017

SEQ ID NO: 3112 - DNA, 51 bp, Homo sapiens
aaagccccaagctagactttaatagraaccagggttacagggtttctggtt

SEQ ID NO: 3113 - DNA, 51 bp, Homo sapiens; identical to SEQ ID NO: 2409

SEQ ID NO: 3114 - DNA, 51 bp, Homo sapiens; identical to SEQ ID NO: 2597

SEQ ID NO: 3115 - DNA, 51 bp, Homo sapiens
tgcttttagtgacatgtcgattcacratgtttcggtgagtgcagctgagac

SEQ ID NO: 3116 - DNA, 51 bp, Homo sapiens
atgaagtcgggactgcccaaacccgkgcacagcgccgcgcccatcctgcac

SEQ ID NO: 3117 - DNA, 51 bp, Homo sapiens
tattaatattgcctatgtttttatgygagtatggtcagcagcataatgctt

SEQ ID NO: 3118 - DNA, 51 bp, Homo sapiens; identical to SEQ ID NO: 445

SEQ ID NO: 3119 - DNA, 51 bp, Homo sapiens
ggtgaagagaagggatagactaagarccagctgaaggtttgtgtaacagcc

SEQ ID NO: 3120 - DNA, 51 bp, Homo sapiens
taaaccggtgctgattcttgcatttyggaaggctttgccgaatccatcact

SEQ ID NO: 3121 - DNA, 51 bp, Homo sapiens; identical to SEQ ID NO: 1046

SEQ ID NO: 3122 - DNA, 51 bp, Homo sapiens; identical to SEQ ID NO: 530

SEQ ID NO: 3123 - DNA, 51 bp, Homo sapiens; identical to SEQ ID NO: 1356

SEQ ID NO: 3124 - DNA, 51 bp, Homo sapiens; identical to SEQ ID NO: 2255

SEQ ID NO: 3125 - DNA, 51 bp, Homo sapiens; identical to SEQ ID NO: 1306

SEQ ID NO: 3126 - DNA, 51 bp, Homo sapiens; identical to SEQ ID NO: 1735

SEQ ID NO: 3127 - DNA, 51 bp, Homo sapiens; identical to SEQ ID NO: 1627

SEQ ID NO: 3128 - DNA, 51 bp, Homo sapiens; identical to SEQ ID NO: 788

SEQ ID NO: 3129 - DNA, 51 bp, Homo sapiens; identical to SEQ ID NO: 2593

SEQ ID NO: 3130 - DNA, 51 bp, Homo sapiens; identical to SEQ ID NO: 2834

SEQ ID NO: 3131 - DNA, 51 bp, Homo sapiens; identical to SEQ ID NO: 61

SEQ ID NO: 3132 - DNA, 51 bp, Homo sapiens; identical to SEQ ID NO: 989

SEQ ID NO: 3133 - DNA, 51 bp, Homo sapiens; identical to SEQ ID NO: 503

SEQ ID NO: 3134 - DNA, 51 bp, Homo sapiens; identical to SEQ ID NO: 1288

SEQ ID NO: 3135 - DNA, 51 bp, Homo sapiens; identical to SEQ ID NO: 229

SEQ ID NO: 3136 - DNA, 51 bp, Homo sapiens; identical to SEQ ID NO: 2272

SEQ ID NO: 3137 - DNA, 51 bp, Homo sapiens; identical to SEQ ID NO: 1134

SEQ ID NO: 3138 - DNA, 51 bp, Homo sapiens
tggtggtcctttctgtcctcagcatwgttagaacactttgtcttatctgcc

SEQ ID NO: 3139 - DNA, 51 bp, Homo sapiens
agtccctaccgagcagctcctccctygcctgcagccatcacaccatctcca

SEQ ID NO: 3140 - DNA, 51 bp, Homo sapiens
tgtttatgagccaggaagaggcttcmtcccaccaaaaatcaacctgatagt

SEQ ID NO: 3141 - DNA, 51 bp, Homo sapiens; identical to SEQ ID NO: 97

SEQ ID NO: 3142 - DNA, 51 bp, Homo sapiens
ggaaccagtacccttgttgaaatatkatggtagattaacacaaaacaatct

SEQ ID NO: 3143 - DNA, 51 bp, Homo sapiens; identical to SEQ ID NO: 155

SEQ ID NO: 3144 - DNA, 51 bp, Homo sapiens; identical to SEQ ID NO: 1576

SEQ ID NO: 3145 - DNA, 51 bp, Homo sapiens; identical to SEQ ID NO: 2933

SEQ ID NO: 3146 - DNA, 51 bp, Homo sapiens
cttatctctttctctgtgtctgtctyatctagcagttcctcggtttctctc

SEQ ID NO: 3147 - DNA, 51 bp, Homo sapiens
ggaacctgcacacaaactggggctayagagattctccaaggacagatggca

SEQ ID NO: 3148 - DNA, 51 bp, Homo sapiens; identical to SEQ ID NO: 1465

SEQ ID NO: 3149 - DNA, 51 bp, Homo sapiens; identical to SEQ ID NO: 1143

SEQ ID NO: 3150 - DNA, 51 bp, Homo sapiens; identical to SEQ ID NO: 500

SEQ ID NO: 3151 - DNA, 51 bp, Homo sapiens; identical to SEQ ID NO: 1537

SEQ ID NO: 3152 - DNA, 51 bp, Homo sapiens; identical to SEQ ID NO: 2818

SEQ ID NO: 3153 - DNA, 51 bp, Homo sapiens; identical to SEQ ID NO: 179

SEQ ID NO: 3154 - DNA, 51 bp, Homo sapiens
taaaacaacatttatttctcttaagscatcaaagacatctttctattgcat

SEQ ID NO: 3155 - DNA, 51 bp, Homo sapiens
atagctatatctctcctgaagtcttyttgcagttactaattaaggcagtac

SEQ ID NO: 3156 - DNA, 51 bp, Homo sapiens; identical to SEQ ID NO: 243

SEQ ID NO: 3157 - DNA, 51 bp, Homo sapiens; identical to SEQ ID NO: 1159

SEQ ID NO: 3158 - DNA, 51 bp, Homo sapiens; identical to SEQ ID NO: 126

SEQ ID NO: 3159 - DNA, 51 bp, Homo sapiens; identical to SEQ ID NO: 241

SEQ ID NO: 3160 - DNA, 51 bp, Homo sapiens; identical to SEQ ID NO: 1853

SEQ ID NO: 3161 - DNA, 51 bp, Homo sapiens; identical to SEQ ID NO: 1461

SEQ ID NO: 3162 - DNA, 51 bp, Homo sapiens; identical to SEQ ID NO: 120

SEQ ID NO: 3163 - DNA, 51 bp, Homo sapiens; identical to SEQ ID NO: 795

SEQ ID NO: 3164 - DNA, 51 bp, Homo sapiens
cagtctctaagtggaatatgggtgtytcatttaaagttattccatcaattt

SEQ ID NO: 3165 - DNA, 51 bp, Homo sapiens; identical to SEQ ID NO: 2881

SEQ ID NO: 3166 - DNA, 51 bp, Homo sapiens
gtgttcaggattttggagaaaaactrtggaaattctgattgtaatagaaat

SEQ ID NO: 3167 - DNA, 51 bp, Homo sapiens; identical to SEQ ID NO: 1274

SEQ ID NO: 3168 - DNA, 51 bp, Homo sapiens; identical to SEQ ID NO: 58

SEQ ID NO: 3169 - DNA, 51 bp, Homo sapiens
gatttgtttgtttaccaccgagaaargtgatctttatgtctccactgctac

SEQ ID NO: 3170 - DNA, 51 bp, Homo sapiens; identical to SEQ ID NO: 8

SEQ ID NO: 3171 - DNA, 51 bp, Homo sapiens; identical to SEQ ID NO: 352

SEQ ID NO: 3172 - DNA, 51 bp, Homo sapiens; identical to SEQ ID NO: 1156

SEQ ID NO: 3173 - DNA, 51 bp, Homo sapiens; identical to SEQ ID NO: 116

SEQ ID NO: 3174 - DNA, 51 bp, Homo sapiens; identical to SEQ ID NO: 183

SEQ ID NO: 3175 - DNA, 51 bp, Homo sapiens; identical to SEQ ID NO: 2936

SEQ ID NO: 3176 - DNA, 51 bp, Homo sapiens; identical to SEQ ID NO: 909

SEQ ID NO: 3177 - DNA, 51 bp, Homo sapiens; identical to SEQ ID NO: 2422

SEQ ID NO: 3178 - DNA, 51 bp, Homo sapiens; identical to SEQ ID NO: 1813

SEQ ID NO: 3179 - DNA, 51 bp, Homo sapiens; identical to SEQ ID NO: 2416

SEQ ID NO: 3180 - DNA, 51 bp, Homo sapiens; identical to SEQ ID NO: 1692

SEQ ID NO: 3181 - DNA, 51 bp, Homo sapiens; identical to SEQ ID NO: 2766

SEQ ID NO: 3182 - DNA, 51 bp, Homo sapiens
aggaaattgtaagcacattttgtttygagagtccagcaaggattttctaag

SEQ ID NO: 3183 - DNA, 51 bp, Homo sapiens; identical to SEQ ID NO: 1392

SEQ ID NO: 3184 - DNA, 51 bp, Homo sapiens
tgttagagattataaccccaaattcstcatgtaagaggcaccataatgctt

SEQ ID NO: 3185 - DNA, 51 bp, Homo sapiens
cctttagctgccttggatagaagcarataataaaaccagagcagacatatg

SEQ ID NO: 3186 - DNA, 51 bp, Homo sapiens; identical to SEQ ID NO: 604

SEQ ID NO: 3187 - DNA, 51 bp, Homo sapiens
tactgatagaagtgcaggaagaaatytgaagtgaagagtgaacaggaggtc

SEQ ID NO: 3188 - DNA, 51 bp, Homo sapiens
aaactggggttttggtctttccttcyagaaaacacactgagaaactcttgc

SEQ ID NO: 3189 - DNA, 51 bp, Homo sapiens
gagtttagatttcttccttcagcaaygtactatgtattactcagggttccc

SEQ ID NO: 3190 - DNA, 51 bp, Homo sapiens; identical to SEQ ID NO: 1530

SEQ ID NO: 3191 - DNA, 51 bp, Homo sapiens
tcatcccagtgcctggtatcatgccktggtgaagccccttatacagttagt

SEQ ID NO: 3192 - DNA, 51 bp, Homo sapiens
aatcatgcttcacaatctaaaaatcratgtggctcttgaagcttctgctcc

SEQ ID NO: 3193 - DNA, 51 bp, Homo sapiens
agtgcaggggacctaacgccgcatgyatttggaatttagatctgaaacagg

SEQ ID NO: 3194 - DNA, 51 bp, Homo sapiens; identical to SEQ ID NO: 865

SEQ ID NO: 3195 - DNA, 51 bp, Homo sapiens
aattgtggggatacagctatcacagyctgttagtgacagtacaacaatctt

SEQ ID NO: 3196 - DNA, 51 bp, Homo sapiens; identical to SEQ ID NO: 484

SEQ ID NO: 3197 - DNA, 51 bp, Homo sapiens; identical to SEQ ID NO: 2741

SEQ ID NO: 3198 - DNA, 51 bp, Homo sapiens; identical to SEQ ID NO: 248

SEQ ID NO: 3199 - DNA, 51 bp, Homo sapiens; identical to SEQ ID NO: 1879

SEQ ID NO: 3200 - DNA, 51 bp, Homo sapiens
cctgcgtggacagcagtcatttctgyggcgagtagggtgagcactggattc

SEQ ID NO: 3201 - DNA, 51 bp, Homo sapiens
aagaagtaagctgggatacagaaaaytcacaccctcaacacacgatcacta

SEQ ID NO: 3202 - DNA, 51 bp, Homo sapiens; identical to SEQ ID NO: 148

SEQ ID NO: 3203 - DNA, 51 bp, Homo sapiens
aaatgatcaagacagtatttggataycatagggctgccatcaatatgcgtc

SEQ ID NO: 3204 - DNA, 51 bp, Homo sapiens; identical to SEQ ID NO: 2855

SEQ ID NO: 3205 - DNA, 51 bp, Homo sapiens; identical to SEQ ID NO: 483

SEQ ID NO: 3206 - DNA, 51 bp, Homo sapiens; identical to SEQ ID NO: 2382

SEQ ID NO: 3207 - DNA, 51 bp, Homo sapiens; identical to SEQ ID NO: 328

SEQ ID NO: 3208 - DNA, 51 bp, Homo sapiens
agacttttatcagaacttatggaaakggaaaagttaaatgacaggaaggat

SEQ ID NO: 3209 - DNA, 51 bp, Homo sapiens; identical to SEQ ID NO: 1604

SEQ ID NO: 3210 - DNA, 51 bp, Homo sapiens
ccatgtaaatggtcacagggagtcarcagagctagaagaaacttcctctcg

SEQ ID NO: 3211 - DNA, 51 bp, Homo sapiens
tgagcccctattataagtgccagacyctttacataaattgtgctaggccca

SEQ ID NO: 3212 - DNA, 51 bp, Homo sapiens; identical to SEQ ID NO: 1308

SEQ ID NO: 3213 - DNA, 51 bp, Homo sapiens
tcttccacatcagtgcgtttacctgsgttcatcagcaccttttattaccaa

SEQ ID NO: 3214 - DNA, 51 bp, Homo sapiens
actgtggttgctttcattccctactstgttcatatgttaatgaaacaaagc

SEQ ID NO: 3215 - DNA, 51 bp, Homo sapiens
tggacacaggcctccagacaccactstctccaccatccagggctctttgcc

SEQ ID NO: 3216 - DNA, 51 bp, Homo sapiens
tgagcttctcttttctttctaggacygattgtgggtgtgacagccttgggt

SEQ ID NO: 3217 - DNA, 51 bp, Homo sapiens; identical to SEQ ID NO: 364

SEQ ID NO: 3218 - DNA, 51 bp, Homo sapiens; identical to SEQ ID NO: 2628

SEQ ID NO: 3219 - DNA, 51 bp, Homo sapiens; identical to SEQ ID NO: 975

SEQ ID NO: 3220 - DNA, 51 bp, Homo sapiens; identical to SEQ ID NO: 905

SEQ ID NO: 3221 - DNA, 51 bp, Homo sapiens; identical to SEQ ID NO: 2358

SEQ ID NO: 3222 - DNA, 51 bp, Homo sapiens
ccaggctgggctggtggagttggcaygagatgtcagaggaacctgagtcat

SEQ ID NO: 3223 - DNA, 51 bp, Homo sapiens
agctgaaagagaaattaataaaagtyagaaagcttataggactagaaaaca

SEQ ID NO: 3224 - DNA, 51 bp, Homo sapiens
tcccgtagtattttgtgtagactttrtcatagcacagaaatcattattttt

SEQ ID NO: 3225 - DNA, 51 bp, Homo sapiens
gactttttgtaggacctgtgcgtgcraaacccatggcaattgtcacatcct

SEQ ID NO: 3226 - DNA, 51 bp, Homo sapiens; identical to SEQ ID NO: 1271

SEQ ID NO: 3227 - DNA, 51 bp, Homo sapiens
ggacctacctgaagtgagaattaaaragaagaccttcctcttgtcttgtcg

SEQ ID NO: 3228 - DNA, 51 bp, Homo sapiens
ttaaagataaaactgtgtccctgctytactcgtttgctttcttaaacattg

SEQ ID NO: 3229 - DNA, 51 bp, Homo sapiens
aattgtttattatttatactgtaacyacttgtaggttaaaggatgatgctc

SEQ ID NO: 3230 - DNA, 51 bp, Homo sapiens; identical to SEQ ID NO: 2540

SEQ ID NO: 3231 - DNA, 51 bp, Homo sapiens; identical to SEQ ID NO: 1753

SEQ ID NO: 3232 - DNA, 51 bp, Homo sapiens
aagaattcaaactagacggacagccrgtattccttcctctgactgaaaact

SEQ ID NO: 3233 - DNA, 51 bp, Homo sapiens
cctacctgtgatgaacttactggaaygggaacttttcactttacaattagc

SEQ ID NO: 3234 - DNA, 51 bp, Homo sapiens; identical to SEQ ID NO: 1666

SEQ ID NO: 3235 - DNA, 51 bp, Homo sapiens; identical to SEQ ID NO: 2365

SEQ ID NO: 3236 - DNA, 51 bp, Homo sapiens; identical to SEQ ID NO: 69

SEQ ID NO: 3237 - DNA, 51 bp, Homo sapiens; identical to SEQ ID NO: 1047

SEQ ID NO: 3238 - DNA, 51 bp, Homo sapiens; identical to SEQ ID NO: 1147

SEQ ID NO: 3239 - DNA, 51 bp, Homo sapiens
ctcctctgtaatctctgtgcctggcmtaacactagggacataataggaatg

SEQ ID NO: 3240 - DNA, 51 bp, Homo sapiens; identical to SEQ ID NO: 1942

SEQ ID NO: 3241 - DNA, 51 bp, Homo sapiens; identical to SEQ ID NO: 2749

SEQ ID NO: 3242 - DNA, 51 bp, Homo sapiens; identical to SEQ ID NO: 2701

SEQ ID NO: 3243 - DNA, 51 bp, Homo sapiens
tagaatccattcattattatgtgtgrctggagaggtatattgcttaaaaac

SEQ ID NO: 3244 - DNA, 51 bp, Homo sapiens
ctcacttttcctttgaagtatgaccktaggttgtctacctcccctcgtagc

SEQ ID NO: 3245 - DNA, 51 bp, Homo sapiens; identical to SEQ ID NO: 2379

SEQ ID NO: 3246 - DNA, 51 bp, Homo sapiens
attctacatcctatttagagctaagrtctatgtctttctatcttccaaacc

SEQ ID NO: 3247 - DNA, 51 bp, Homo sapiens; identical to SEQ ID NO: 2101

SEQ ID NO: 3248 - DNA, 51 bp, Homo sapiens
tatatgttagagaaataaaggtagaytgaagaaacaaacaaatagctctaa

SEQ ID NO: 3249 - DNA, 51 bp, Homo sapiens; identical to SEQ ID NO: 2852

SEQ ID NO: 3250 - DNA, 51 bp, Homo sapiens; identical to SEQ ID NO: 1303

SEQ ID NO: 3251 - DNA, 51 bp, Homo sapiens; identical to SEQ ID NO: 2188

SEQ ID NO: 3252 - DNA, 51 bp, Homo sapiens; identical to SEQ ID NO: 18

SEQ ID NO: 3253 - DNA, 51 bp, Homo sapiens
gattgtatatatctgctgctttcttyctatgattctgttcataatggtctg

SEQ ID NO: 3254 - DNA, 51 bp, Homo sapiens; identical to SEQ ID NO: 1734

SEQ ID NO: 3255 - DNA, 51 bp, Homo sapiens
aagccaggagaagtgacatagtggaragccggcatgctgggagcctagtga

SEQ ID NO: 3256 - DNA, 51 bp, Homo sapiens; identical to SEQ ID NO: 2388

SEQ ID NO: 3257 - DNA, 51 bp, Homo sapiens
ggagagagcagatgtaaaggagaggraagtttatgtctcctactttataat

SEQ ID NO: 3258 - DNA, 51 bp, Homo sapiens; identical to SEQ ID NO: 2729

SEQ ID NO: 3259 - DNA, 51 bp, Homo sapiens; identical to SEQ ID NO: 1522

SEQ ID NO: 3260 - DNA, 51 bp, Homo sapiens
agggcacaaatttctggctcttcgayacactcatcaatatctaaaagaatc

SEQ ID NO: 3261 - DNA, 51 bp, Homo sapiens; identical to SEQ ID NO: 2872

SEQ ID NO: 3262 - DNA, 51 bp, Homo sapiens
cttgtcctgggaaggccaggcctgcrtggcagagatgtaaccagactccaa

SEQ ID NO: 3263 - DNA, 51 bp, Homo sapiens; identical to SEQ ID NO: 1114

SEQ ID NO: 3264 - DNA, 51 bp, Homo sapiens; identical to SEQ ID NO: 569

SEQ ID NO: 3265 - DNA, 51 bp, Homo sapiens
ttacagcaatatactttccacaaaaygcaatatatgtaggtaggtggatag

SEQ ID NO: 3266 - DNA, 51 bp, Homo sapiens
ttaaatgggatgtccctttcctctgsaggagcagcgtcttccccagaacag

SEQ ID NO: 3267 - DNA, 51 bp, Homo sapiens; identical to SEQ ID NO: 1990

SEQ ID NO: 3268 - DNA, 51 bp, Homo sapiens; identical to SEQ ID NO: 1094

SEQ ID NO: 3269 - DNA, 51 bp, Homo sapiens
tcagtcttatgaatatgcaaatataygctctttaccaatttatatttagtc

SEQ ID NO: 3270 - DNA, 51 bp, Homo sapiens; identical to SEQ ID NO: 3013

SEQ ID NO: 3271 - DNA, 51 bp, Homo sapiens; identical to SEQ ID NO: 2594

SEQ ID NO: 3272 - DNA, 51 bp, Homo sapiens
ataacctaccatgtttaccaggtccrccaagactatgaaacaaatatatgt

SEQ ID NO: 3273 - DNA, 51 bp, Homo sapiens
atatattttttaattttttcttactrtactgccaactagatgtggagtttc

SEQ ID NO: 3274 - DNA, 51 bp, Homo sapiens
gttatgcgggaataaacaactgatasaacattttgacaaaccatctctttg

SEQ ID NO: 3275 - DNA, 51 bp, Homo sapiens; identical to SEQ ID NO: 2727

SEQ ID NO: 3276 - DNA, 51 bp, Homo sapiens; identical to SEQ ID NO: 266

SEQ ID NO: 3277 - DNA, 51 bp, Homo sapiens; identical to SEQ ID NO: 2934

SEQ ID NO: 3278 - DNA, 51 bp, Homo sapiens; identical to SEQ ID NO: 250

SEQ ID NO: 3279 - DNA, 51 bp, Homo sapiens; identical to SEQ ID NO: 55

SEQ ID NO: 3280 - DNA, 51 bp, Homo sapiens
cactgtcttttcttctctattcaaaytctatccttcctttttttcctactt

SEQ ID NO: 3281 - DNA, 51 bp, Homo sapiens; identical to SEQ ID NO: 1987

SEQ ID NO: 3282 - DNA, 51 bp, Homo sapiens
aatttttaaagcttatttagcaacaygactggcacttccatacatgaaaag

SEQ ID NO: 3283 - DNA, 51 bp, Homo sapiens; identical to SEQ ID NO: 1690

SEQ ID NO: 3284 - DNA, 51 bp, Homo sapiens
aaaatgtatcgaagttttaaacagcygtgatggctatttggctgcaagttc

SEQ ID NO: 3285 - DNA, 51 bp, Homo sapiens; identical to SEQ ID NO: 2735

SEQ ID NO: 3286 - DNA, 51 bp, Homo sapiens; identical to SEQ ID NO: 172

SEQ ID NO: 3287 - DNA, 51 bp, Homo sapiens
ggctttgagctgtatgaaaaagattygaactaactgcaagaaagaatttga

SEQ ID NO: 3288 - DNA, 51 bp, Homo sapiens
tgatgtgcaagtctgctcccgtcagrtctacttcgtggcctgcaccgtggc

SEQ ID NO: 3289 - DNA, 51 bp, Homo sapiens; identical to SEQ ID NO: 1895

SEQ ID NO: 3290 - DNA, 51 bp, Homo sapiens; identical to SEQ ID NO: 2599

SEQ ID NO: 3291 - DNA, 51 bp, Homo sapiens; identical to SEQ ID NO: 1822

SEQ ID NO: 3292 - DNA, 51 bp, Homo sapiens; identical to SEQ ID NO: 2461

SEQ ID NO: 3293 - DNA, 51 bp, Homo sapiens
ttacagaggagtaagctgattttackttttatgtctaaaagtgaacggatg

SEQ ID NO: 3294 - DNA, 51 bp, Homo sapiens; identical to SEQ ID NO: 1997

SEQ ID NO: 3295 - DNA, 51 bp, Homo sapiens; identical to SEQ ID NO: 1645

SEQ ID NO: 3296 - DNA, 51 bp, Homo sapiens
gagtcatccgggctgtggggacaccrtagggctgatagatgagcagaacga

SEQ ID NO: 3297 - DNA, 51 bp, Homo sapiens; identical to SEQ ID NO: 166

SEQ ID NO: 3298 - DNA, 51 bp, Homo sapiens
agcttatatacatacacaacactttsatcatagtagacgtgatggcaaacc

SEQ ID NO: 3299 - DNA, 51 bp, Homo sapiens
tctgtgagaagggcatttgtcgaggwtgctaaaaccctaaaacagtgagtt

SEQ ID NO: 3300 - DNA, 51 bp, Homo sapiens
gacccccacgctcagctgctacagcrccgcctcgacttcctcgccaagcac

SEQ ID NO: 3301 - DNA, 51 bp, Homo sapiens
tgtttattgttaacagtcaccagaastttctttggactagttcaggcaaca

SEQ ID NO: 3302 - DNA, 51 bp, Homo sapiens; identical to SEQ ID NO: 1629

SEQ ID NO: 3303 - DNA, 51 bp, Homo sapiens; identical to SEQ ID NO: 1694

SEQ ID NO: 3304 - DNA, 51 bp, Homo sapiens; identical to SEQ ID NO: 1615

SEQ ID NO: 3305 - DNA, 51 bp, Homo sapiens
ttttccccaaagagcctgttggccaycctaagcaagtactgcgtgccagtc

SEQ ID NO: 3306 - DNA, 51 bp, Homo sapiens
aggagcctgtttcctttgttttatcmgcaaggcaaggagagacaagggaaa

SEQ ID NO: 3307 - DNA, 51 bp, Homo sapiens; identical to SEQ ID NO: 401

SEQ ID NO: 3308 - DNA, 51 bp, Homo sapiens
aaacatattcctgctacaattgtacsaataatttttttcccagactttcta

SEQ ID NO: 3309 - DNA, 51 bp, Homo sapiens
agcaataatactcttactagctctcmtaaaagaggggatgtagctggtact

SEQ ID NO: 3310 - DNA, 51 bp, Homo sapiens; identical to SEQ ID NO: 2157

SEQ ID NO: 3311 - DNA, 51 bp, Homo sapiens
acaagtcttcagaatgccagagatayacaggatatgcgaattaagaagaaa

SEQ ID NO: 3312 - DNA, 51 bp, Homo sapiens; identical to SEQ ID NO: 1333

SEQ ID NO: 3313 - DNA, 51 bp, Homo sapiens; identical to SEQ ID NO: 2992

SEQ ID NO: 3314 - DNA, 51 bp, Homo sapiens; identical to SEQ ID NO: 1323

SEQ ID NO: 3315 - DNA, 51 bp, Homo sapiens; identical to SEQ ID NO: 1835

SEQ ID NO: 3316 - DNA, 51 bp, Homo sapiens
atagctgattacatgttttcttctgytgcttgcatgttcctttatctcctc

SEQ ID NO: 3317 - DNA, 51 bp, Homo sapiens; identical to SEQ ID NO: 1930

SEQ ID NO: 3318 - DNA, 51 bp, Homo sapiens; identical to SEQ ID NO: 1230

SEQ ID NO: 3319 - DNA, 51 bp, Homo sapiens
agtgttcatttaaaagtgtaccaccygccatgtaatcgtgggctttggtca

SEQ ID NO: 3320 - DNA, 51 bp, Homo sapiens
cttctctatggggtttacagtattamagttcaggattaaactagagaagga

SEQ ID NO: 3321 - DNA, 51 bp, Homo sapiens; identical to SEQ ID NO: 2771

SEQ ID NO: 3322 - DNA, 51 bp, Homo sapiens
tcctttgtttttttggcacccttatytcagaccactaatcacaaattgtag

SEQ ID NO: 3323 - DNA, 51 bp, Homo sapiens; identical to SEQ ID NO: 1625

SEQ ID NO: 3324 - DNA, 51 bp, Homo sapiens
ggaagaagatctttcctttttgaagktgtcctgtctgtaggcttcttcata

SEQ ID NO: 3325 - DNA, 51 bp, Homo sapiens
gctatagaattacagggtttgaaaaytaccggattaaaaaaattaattcca

SEQ ID NO: 3326 - DNA, 51 bp, Homo sapiens; identical to SEQ ID NO: 343

SEQ ID NO: 3327 - DNA, 51 bp, Homo sapiens
gtgttgaatctaccatttatctttcyagcactggattcatttcttagttaa

SEQ ID NO: 3328 - DNA, 51 bp, Homo sapiens; identical to SEQ ID NO: 1237

SEQ ID NO: 3329 - DNA, 51 bp, Homo sapiens; identical to SEQ ID NO: 1488

SEQ ID NO: 3330 - DNA, 51 bp, Homo sapiens; identical to SEQ ID NO: 1752

SEQ ID NO: 3331 - DNA, 51 bp, Homo sapiens
aattcagcaaattgggacatcttctscatgtgactaggacagagtattgga

SEQ ID NO: 3332 - DNA, 51 bp, Homo sapiens
gaaacctgggccagggatacattttygcaggtcccgcagacactgctaagc

SEQ ID NO: 3333 - DNA, 51 bp, Homo sapiens
aaaaacttgcaattaacgaattcttyctctgcacctttgaggtataaatct

SEQ ID NO: 3334 - DNA, 51 bp, Homo sapiens
caacacatttcacactgctcagtacktaaagggatcgaggaaacgttatac

SEQ ID NO: 3335 - DNA, 51 bp, Homo sapiens
gtagagccgaagttcagtgccagggycgtctgggggtcttctgctgcaccc

SEQ ID NO: 3336 - DNA, 51 bp, Homo sapiens; identical to SEQ ID NO: 1347

SEQ ID NO: 3337 - DNA, 51 bp, Homo sapiens
gagggttgaggctgtcgaaggagggratggctcgtgttcatccattgttct

SEQ ID NO: 3338 - DNA, 51 bp, Homo sapiens
cggccgtggctggcgtgctctcctamcccttcgacacagtgcggcggcgga

SEQ ID NO: 3339 - DNA, 51 bp, Homo sapiens; identical to SEQ ID NO: 1738

SEQ ID NO: 3340 - DNA, 51 bp, Homo sapiens; identical to SEQ ID NO: 424

SEQ ID NO: 3341 - DNA, 51 bp, Homo sapiens; identical to SEQ ID NO: 83

SEQ ID NO: 3342 - DNA, 51 bp, Homo sapiens
tactgagatggattattagtacaatkcccaaatagagaggattctccatta

SEQ ID NO: 3343 - DNA, 51 bp, Homo sapiens; identical to SEQ ID NO: 2856

SEQ ID NO: 3344 - DNA, 51 bp, Homo sapiens; identical to SEQ ID NO: 920

SEQ ID NO: 3345 - DNA, 51 bp, Homo sapiens
cttaaacgctgaagtatcctggtagrtaaatagtaaaaagcatctgaagca

SEQ ID NO: 3346 - DNA, 51 bp, Homo sapiens; identical to SEQ ID NO: 517

SEQ ID NO: 3347 - DNA, 51 bp, Homo sapiens
tatattttcagttccttgaatcgtaygaataccctccgcctatcaggtaag

SEQ ID NO: 3348 - DNA, 51 bp, Homo sapiens; identical to SEQ ID NO: 1193

SEQ ID NO: 3349 - DNA, 51 bp, Homo sapiens; identical to SEQ ID NO: 407

SEQ ID NO: 3350 - DNA, 51 bp, Homo sapiens
caatccagaggaccgcagtgatagcyccgagggctggagtgacgcccactt

SEQ ID NO: 3351 - DNA, 51 bp, Homo sapiens
gggagaaagaggaattggatcatttraaaagaacatggagtgaatttatct

SEQ ID NO: 3352 - DNA, 51 bp, Homo sapiens
aacgcagaactcatttcttctgaaaytcaaaaatatctgtaacgcctacac

SEQ ID NO: 3353 - DNA, 51 bp, Homo sapiens
gctcagaatgtatttccaatctctgyagtctccatttttggcaggcacaca

SEQ ID NO: 3354 - DNA, 51 bp, Homo sapiens; identical to SEQ ID NO: 1338

SEQ ID NO: 3355 - DNA, 51 bp, Homo sapiens
ggctatgagttgctgggaaagccagygtaacattcccaggcctggggttgt

SEQ ID NO: 3356 - DNA, 51 bp, Homo sapiens
tttaatcggtttttatgtaaaagcaygtgtcattatgaacaaggaatacag

SEQ ID NO: 3357 - DNA, 51 bp, Homo sapiens
tgcaattattattttctagacagaastgccaactgttgtgctttccagtgt

SEQ ID NO: 3358 - DNA, 51 bp, Homo sapiens
gagatatataattactgtccttaagwtactatcctttctcttggtatcttt

SEQ ID NO: 3359 - DNA, 51 bp, Homo sapiens
ttagaatattgcaaatacagctttamaaaataaatacaacttcattttaca

SEQ ID NO: 3360 - DNA, 51 bp, Homo sapiens
cagtatatcttaattgattcactgaytttctagtggaacagatgagaggtg

SEQ ID NO: 3361 - DNA, 51 bp, Homo sapiens; identical to SEQ ID NO: 2481

SEQ ID NO: 3362 - DNA, 51 bp, Homo sapiens
atggtatttccaacccataatacackgatttggctttccacttgtgctctc

SEQ ID NO: 3363 - DNA, 51 bp, Homo sapiens
tcttaccttgaatttgaccagatttkctcccaagcattttcaaaggcattt

SEQ ID NO: 3364 - DNA, 51 bp, Homo sapiens; identical to SEQ ID NO: 105

SEQ ID NO: 3365 - DNA, 51 bp, Homo sapiens; identical to SEQ ID NO: 1080

SEQ ID NO: 3366 - DNA, 51 bp, Homo sapiens; identical to SEQ ID NO: 1172

SEQ ID NO: 3367 - DNA, 51 bp, Homo sapiens; identical to SEQ ID NO: 714

SEQ ID NO: 3368 - DNA, 51 bp, Homo sapiens
aaataccagtgttaagccttacattwgttactttacttaatcagtatagca

SEQ ID NO: 3369 - DNA, 51 bp, Homo sapiens
tttggcttaaaaggggtacaattagrtcttactcatgctgattaaggcaaa

SEQ ID NO: 3370 - DNA, 51 bp, Homo sapiens; identical to SEQ ID NO: 2048

SEQ ID NO: 3371 - DNA, 51 bp, Homo sapiens
cttctcatgcaaaggaaggccaagcrtcgattccagcaggtgccgcctgta

SEQ ID NO: 3372 - DNA, 51 bp, Homo sapiens
gtctggaatgagtatgcttgtattcratgctgtattcctcctaattgagca

SEQ ID NO: 3373 - DNA, 51 bp, Homo sapiens; identical to SEQ ID NO: 2811

SEQ ID NO: 3374 - DNA, 51 bp, Homo sapiens
acacattcaatagccacatttaaacrgaatcattaactttggggaaacttg

SEQ ID NO: 3375 - DNA, 51 bp, Homo sapiens
ataagattctagcataatttggaaamctgtagggctctgaaaacaaaggag

SEQ ID NO: 3376 - DNA, 51 bp, Homo sapiens; identical to SEQ ID NO: 1673

SEQ ID NO: 3377 - DNA, 51 bp, Homo sapiens; identical to SEQ ID NO: 2311

SEQ ID NO: 3378 - DNA, 51 bp, Homo sapiens; identical to SEQ ID NO: 1196

SEQ ID NO: 3379 - DNA, 51 bp, Homo sapiens; identical to SEQ ID NO: 2429

SEQ ID NO: 3380 - DNA, 51 bp, Homo sapiens; identical to SEQ ID NO: 203

SEQ ID NO: 3381 - DNA, 51 bp, Homo sapiens; identical to SEQ ID NO: 1730

SEQ ID NO: 3382 - DNA, 51 bp, Homo sapiens
agatagccaatggccttggacttgayctctggagtaagctgctgtgtttca

SEQ ID NO: 3383 - DNA, 51 bp, Homo sapiens; identical to SEQ ID NO: 1972

SEQ ID NO: 3384 - DNA, 51 bp, Homo sapiens
agttttcccaaactattcattcagcyactttagcctaatattaatactgca

SEQ ID NO: 3385 - DNA, 51 bp, Homo sapiens; identical to SEQ ID NO: 1603

SEQ ID NO: 3386 - DNA, 51 bp, Homo sapiens; identical to SEQ ID NO: 1298

SEQ ID NO: 3387 - DNA, 51 bp, Homo sapiens
tcctaaacacgtctcttctgtcactycccgaactggcagttctggagcaaa

SEQ ID NO: 3388 - DNA, 51 bp, Homo sapiens
aacttacctaagtctcacaacttccsttcacatcttctctaagaccatgtg

SEQ ID NO: 3389 - DNA, 51 bp, Homo sapiens; identical to SEQ ID NO: 861

SEQ ID NO: 3390 - DNA, 51 bp, Homo sapiens
ccttgcctttattgtttaaatcaccrctttatgaatcatcgatttctgatt

SEQ ID NO: 3391 - DNA, 51 bp, Homo sapiens
atcccaacacacgcagccaactccaraacccagcactgctccaagcacctc

SEQ ID NO: 3392 - DNA, 51 bp, Homo sapiens; identical to SEQ ID NO: 391

SEQ ID NO: 3393 - DNA, 51 bp, Homo sapiens; identical to SEQ ID NO: 1642

SEQ ID NO: 3394 - DNA, 51 bp, Homo sapiens; identical to SEQ ID NO: 924

SEQ ID NO: 3395 - DNA, 51 bp, Homo sapiens; identical to SEQ ID NO: 366

SEQ ID NO: 3396 - DNA, 51 bp, Homo sapiens; identical to SEQ ID NO: 2050

SEQ ID NO: 3397 - DNA, 51 bp, Homo sapiens; identical to SEQ ID NO: 2171

SEQ ID NO: 3398 - DNA, 51 bp, Homo sapiens; identical to SEQ ID NO: 2612

SEQ ID NO: 3399 - DNA, 51 bp, Homo sapiens; identical to SEQ ID NO: 308

SEQ ID NO: 3400 - DNA, 51 bp, Homo sapiens
caccccgcctcggctgcacttaccawctgcctggtccgctggagctgggca

SEQ ID NO: 3401 - DNA, 51 bp, Homo sapiens; identical to SEQ ID NO: 637

SEQ ID NO: 3402 - DNA, 51 bp, Homo sapiens
cttacttagatgtataaacatgaatraaattatctcagtaaaactactaat

SEQ ID NO: 3403 - DNA, 51 bp, Homo sapiens; identical to SEQ ID NO: 1998

SEQ ID NO: 3404 - DNA, 51 bp, Homo sapiens; identical to SEQ ID NO: 123

SEQ ID NO: 3405 - DNA, 51 bp, Homo sapiens; identical to SEQ ID NO: 1362

SEQ ID NO: 3406 - DNA, 51 bp, Homo sapiens; identical to SEQ ID NO: 887

SEQ ID NO: 3407 - DNA, 51 bp, Homo sapiens
gctgatgcctctctagatgggcttaractgacacgggtttatttgaaaact

SEQ ID NO: 3408 - DNA, 51 bp, Homo sapiens
atggggtttcagccatccattttcaytgagtgtgcaaagctgcatttgtca

SEQ ID NO: 3409 - DNA, 51 bp, Homo sapiens; identical to SEQ ID NO: 2006

SEQ ID NO: 3410 - DNA, 51 bp, Homo sapiens
tcctcttcctcctccgcctcctcttsggctggctctaccttctcagagaag

SEQ ID NO: 3411 - DNA, 51 bp, Homo sapiens; identical to SEQ ID NO: 1016

SEQ ID NO: 3412 - DNA, 51 bp, Homo sapiens
ctgagacttgttacaacaacttcttygccaatatttttcaaatgattcaga

SEQ ID NO: 3413 - DNA, 51 bp, Homo sapiens; identical to SEQ ID NO: 1162

SEQ ID NO: 3414 - DNA, 51 bp, Homo sapiens
tttaaaattgttggctgttacctagrtatgactgaaaagatgtatttcttc

SEQ ID NO: 3415 - DNA, 51 bp, Homo sapiens; identical to SEQ ID NO: 122

SEQ ID NO: 3416 - DNA, 51 bp, Homo sapiens
tgttgaaatctaaagcttaaatgagwctcatgtaagtaaacatagtacatt

SEQ ID NO: 3417 - DNA, 51 bp, Homo sapiens
gcaatggcgtggggtgttgtggaaargaaacaaacgtatggttcgtgtaga

SEQ ID NO: 3418 - DNA, 51 bp, Homo sapiens; identical to SEQ ID NO: 1136

SEQ ID NO: 3419 - DNA, 51 bp, Homo sapiens
gcaacagacctggctaggagctacaratagttccaaccaaccagctagaaa

SEQ ID NO: 3420 - DNA, 51 bp, Homo sapiens
aggaaggagcagaactcgggtctaaygggtatgtgctagaggaaacagtct

SEQ ID NO: 3421 - DNA, 51 bp, Homo sapiens; identical to SEQ ID NO: 1113

SEQ ID NO: 3422 - DNA, 51 bp, Homo sapiens; identical to SEQ ID NO: 2395

SEQ ID NO: 3423 - DNA, 51 bp, Homo sapiens; identical to SEQ ID NO: 618

SEQ ID NO: 3424 - DNA, 51 bp, Homo sapiens
aggattatggggacacagatctcagyacattatgaaaaataactttttaaa

SEQ ID NO: 3425 - DNA, 51 bp, Homo sapiens
tcggccatcagggaccagcgtaccgycacgaaatgggttgcgatgatcccc

SEQ ID NO: 3426 - DNA, 51 bp, Homo sapiens
ctgttaccgcgtccggaacttcacgktgatacccagaaatgggatcttaac

SEQ ID NO: 3427 - DNA, 51 bp, Homo sapiens; identical to SEQ ID NO: 38

SEQ ID NO: 3428 - DNA, 51 bp, Homo sapiens; identical to SEQ ID NO: 724

SEQ ID NO: 3429 - DNA, 51 bp, Homo sapiens
taacatggacccactttccacaacgyagattatttttgctatcaacagtct

SEQ ID NO: 3430 - DNA, 51 bp, Homo sapiens
ccacccctctgggtgtgcaataccaytcgtgtctggcaatccattttcttg

SEQ ID NO: 3431 - DNA, 51 bp, Homo sapiens
tttgtgcaaacttcatacacttccaratcttctgtagctgagacgagtgaa

SEQ ID NO: 3432 - DNA, 51 bp, Homo sapiens
attgaaaaaagagaaaggggcaagamattcattaaagaaaaaccacagata

SEQ ID NO: 3433 - DNA, 51 bp, Homo sapiens; identical to SEQ ID NO: 1272

SEQ ID NO: 3434 - DNA, 51 bp, Homo sapiens; identical to SEQ ID NO: 782

SEQ ID NO: 3435 - DNA, 51 bp, Homo sapiens
tgaaacgaccccagcttctctacggkgcccgggaatggtctcacgaggttt

SEQ ID NO: 3436 - DNA, 51 bp, Homo sapiens; identical to SEQ ID NO: 1765

SEQ ID NO: 3437 - DNA, 51 bp, Homo sapiens
taacaaaacacgtgttgcactatgcrtttatttgggggttactttataaca

SEQ ID NO: 3438 - DNA, 51 bp, Homo sapiens; identical to SEQ ID NO: 1290

SEQ ID NO: 3439 - DNA, 51 bp, Homo sapiens
agcctgaggaacttatgtgtggcaaygtggggatatcagtcacctgtctct

SEQ ID NO: 3440 - DNA, 51 bp, Homo sapiens; identical to SEQ ID NO: 1774

SEQ ID NO: 3441 - DNA, 51 bp, Homo sapiens; identical to SEQ ID NO: 90

SEQ ID NO: 3442 - DNA, 51 bp, Homo sapiens
aagctgaacccagctgacccatgtcstggaaaacttcttctggaagccctt

SEQ ID NO: 3443 - DNA, 51 bp, Homo sapiens
aagaacatgttccccaggagaccagrtgatactccactttcagctgtgtgc

SEQ ID NO: 3444 - DNA, 51 bp, Homo sapiens; identical to SEQ ID NO: 2756

SEQ ID NO: 3445 - DNA, 51 bp, Homo sapiens; identical to SEQ ID NO: 160

SEQ ID NO: 3446 - DNA, 51 bp, Homo sapiens; identical to SEQ ID NO: 944

SEQ ID NO: 3447 - DNA, 51 bp, Homo sapiens
ttagtgtgctatagtaagcccatatygactgtggacctattaggttccccc

SEQ ID NO: 3448 - DNA, 51 bp, Homo sapiens; identical to SEQ ID NO: 1727

SEQ ID NO: 3449 - DNA, 51 bp, Homo sapiens; identical to SEQ ID NO: 378

SEQ ID NO: 3450 - DNA, 51 bp, Homo sapiens
ctgtgacttgtagcttaccgcgattycttgcaaggccatagccagtttgtt

SEQ ID NO: 3451 - DNA, 51 bp, Homo sapiens; identical to SEQ ID NO: 1283

SEQ ID NO: 3452 - DNA, 51 bp, Homo sapiens; identical to SEQ ID NO: 2361

SEQ ID NO: 3453 - DNA, 51 bp, Homo sapiens; identical to SEQ ID NO: 1263

SEQ ID NO: 3454 - DNA, 51 bp, Homo sapiens; identical to SEQ ID NO: 402

SEQ ID NO: 3455 - DNA, 51 bp, Homo sapiens; identical to SEQ ID NO: 2005

SEQ ID NO: 3456 - DNA, 51 bp, Homo sapiens
tcactgccctttccaaatatatctgyagcaaaaccttttcatttgtctgat

SEQ ID NO: 3457 - DNA, 51 bp, Homo sapiens; identical to SEQ ID NO: 2117

SEQ ID NO: 3458 - DNA, 51 bp, Homo sapiens
aggccatatgaaatatttacttcaargaaacatacatctcagaacaaagtt

SEQ ID NO: 3459 - DNA, 51 bp, Homo sapiens; identical to SEQ ID NO: 152

SEQ ID NO: 3460 - DNA, 51 bp, Homo sapiens; identical to SEQ ID NO: 36

SEQ ID NO: 3461 - DNA, 51 bp, Homo sapiens; identical to SEQ ID NO: 89

SEQ ID NO: 3462 - DNA, 51 bp, Homo sapiens; identical to SEQ ID NO: 730

SEQ ID NO: 3463 - DNA, 51 bp, Homo sapiens
gtcttggtaacctgtgttggagtttwataattgtttatggatggatgtatg

SEQ ID NO: 3464 - DNA, 51 bp, Homo sapiens; identical to SEQ ID NO: 579

SEQ ID NO: 3465 - DNA, 51 bp, Homo sapiens; identical to SEQ ID NO: 496

SEQ ID NO: 3466 - DNA, 51 bp, Homo sapiens; identical to SEQ ID NO: 603

SEQ ID NO: 3467 - DNA, 51 bp, Homo sapiens
ccttcagtgtttacatatccagaaartggcactgatgatttcagagatcca

SEQ ID NO: 3468 - DNA, 51 bp, Homo sapiens
tttctaccagcttatgcttgtccackatttttaagaattcaggtaatttta

SEQ ID NO: 3469 - DNA, 51 bp, Homo sapiens; identical to SEQ ID NO: 14

SEQ ID NO: 3470 - DNA, 51 bp, Homo sapiens
atgactcctccttttcataatgtgtracaaatttctttggagatcttttag

SEQ ID NO: 3471 - DNA, 51 bp, Homo sapiens
tgggggaacagagatgcaaaactttsgtcctggtcagggtacagtcttcaa

SEQ ID NO: 3472 - DNA, 51 bp, Homo sapiens; identical to SEQ ID NO: 1696

SEQ ID NO: 3473 - DNA, 51 bp, Homo sapiens
aaccggtcaaagaggacatgagctgsgttcatggtctcatgcttcctctcc

SEQ ID NO: 3474 - DNA, 51 bp, Homo sapiens
agaatctcgagtgagcagccaacagrcagtttcatatggttcccaacatga

SEQ ID NO: 3475 - DNA, 51 bp, Homo sapiens; identical to SEQ ID NO: 299

SEQ ID NO: 3476 - DNA, 51 bp, Homo sapiens; identical to SEQ ID NO: 589

SEQ ID NO: 3477 - DNA, 51 bp, Homo sapiens
ctgcattactggtttgcatcgcctasattaaagaaaataacacatatgacc

SEQ ID NO: 3478 - DNA, 51 bp, Homo sapiens; identical to SEQ ID NO: 2517

SEQ ID NO: 3479 - DNA, 51 bp, Homo sapiens; identical to SEQ ID NO: 951

SEQ ID NO: 3480 - DNA, 51 bp, Homo sapiens
tctttaaatttttcctctgtccttgkgtgatttgttgtatagcagtggact

SEQ ID NO: 3481 - DNA, 51 bp, Homo sapiens; identical to SEQ ID NO: 707

SEQ ID NO: 3482 - DNA, 51 bp, Homo sapiens; identical to SEQ ID NO: 2287

SEQ ID NO: 3483 - DNA, 51 bp, Homo sapiens; identical to SEQ ID NO: 1924

SEQ ID NO: 3484 - DNA, 51 bp, Homo sapiens; identical to SEQ ID NO: 2961

SEQ ID NO: 3485 - DNA, 51 bp, Homo sapiens
ttagtgttctagtcatgctaacagtrgctgcagaatcaagtctttcctaga

SEQ ID NO: 3486 - DNA, 51 bp, Homo sapiens
ccaagctgacagctaaacggaatacygtaccaaaaagtatcaatgagcact

SEQ ID NO: 3487 - DNA, 51 bp, Homo sapiens; identical to SEQ ID NO: 1254

SEQ ID NO: 3488 - DNA, 51 bp, Homo sapiens
atcaacgagagcctagagtcctggaytgtttaataagacccacttactagt

SEQ ID NO: 3489 - DNA, 51 bp, Homo sapiens; identical to SEQ ID NO: 1928

SEQ ID NO: 3490 - DNA, 51 bp, Homo sapiens; identical to SEQ ID NO: 1965

SEQ ID NO: 3491 - DNA, 51 bp, Homo sapiens; identical to SEQ ID NO: 308

SEQ ID NO: 3492 - DNA, 51 bp, Homo sapiens; identical to SEQ ID NO: 517

SEQ ID NO: 3493 - DNA, 51 bp, Homo sapiens; identical to SEQ ID NO: 2255

SEQ ID NO: 3494 - DNA, 51 bp, Homo sapiens; identical to SEQ ID NO: 1172

SEQ ID NO: 3495 - DNA, 51 bp, Homo sapiens; identical to SEQ ID NO: 986

SEQ ID NO: 3496 - DNA, 51 bp, Homo sapiens; identical to SEQ ID NO: 229

SEQ ID NO: 3497 - DNA, 51 bp, Homo sapiens; identical to SEQ ID NO: 3332

SEQ ID NO: 3498 - DNA, 51 bp, Homo sapiens; identical to SEQ ID NO: 3414

SEQ ID NO: 3499 - DNA, 51 bp, Homo sapiens; identical to SEQ ID NO: 1727

SEQ ID NO: 3500 - DNA, 51 bp, Homo sapiens
gattatcaaaaaggatgatttaaccwtcagaaagatactaaaatcacacat

SEQ ID NO: 3501 - DNA, 51 bp, Homo sapiens; identical to SEQ ID NO: 1775

SEQ ID NO: 3502 - DNA, 51 bp, Homo sapiens; identical to SEQ ID NO: 2358

SEQ ID NO: 3503 - DNA, 51 bp, Homo sapiens; identical to SEQ ID NO: 2365

SEQ ID NO: 3504 - DNA, 51 bp, Homo sapiens; identical to SEQ ID NO: 3298

SEQ ID NO: 3505 - DNA, 51 bp, Homo sapiens
atatggattccaaacacacaatacgscgaacaagtgttagcactctcaatt

SEQ ID NO: 3506 - DNA, 51 bp, Homo sapiens; identical to SEQ ID NO: 3347

SEQ ID NO: 3507 - DNA, 51 bp, Homo sapiens; identical to SEQ ID NO: 1629

SEQ ID NO: 3508 - DNA, 51 bp, Homo sapiens; identical to SEQ ID NO: 1118

SEQ ID NO: 3509 - DNA, 51 bp, Homo sapiens; identical to SEQ ID NO: 1158

SEQ ID NO: 3510 - DNA, 51 bp, Homo sapiens; identical to SEQ ID NO: 509

SEQ ID NO: 3511 - DNA, 51 bp, Homo sapiens; identical to SEQ ID NO: 1193

SEQ ID NO: 3512 - DNA, 51 bp, Homo sapiens; identical to SEQ ID NO: 97

SEQ ID NO: 3513 - DNA, 51 bp, Homo sapiens; identical to SEQ ID NO: 707

SEQ ID NO: 3514 - DNA, 51 bp, Homo sapiens; identical to SEQ ID NO: 530

SEQ ID NO: 3515 - DNA, 51 bp, Homo sapiens
tgcctatgcagaattggtgtaatttyagagagcagctgacaagtatggaat

SEQ ID NO: 3516 - DNA, 51 bp, Homo sapiens; identical to SEQ ID NO: 1552

SEQ ID NO: 3517 - DNA, 51 bp, Homo sapiens; identical to SEQ ID NO: 1272

SEQ ID NO: 3518 - DNA, 51 bp, Homo sapiens
tgaactgcaagagaggctgggaaackcaaggtcacacataagataaatatc

SEQ ID NO: 3519 - DNA, 51 bp, Homo sapiens; identical to SEQ ID NO: 1090

SEQ ID NO: 3520 - DNA, 51 bp, Homo sapiens
ttccgtcaaaaatatctcctttcatmtggagtcccccatcacagtctaaga

SEQ ID NO: 3521 - DNA, 51 bp, Homo sapiens; identical to SEQ ID NO: 858

SEQ ID NO: 3522 - DNA, 51 bp, Homo sapiens; identical to SEQ ID NO: 1116

SEQ ID NO: 3523 - DNA, 51 bp, Homo sapiens
agtgtagtatgcattccaaagggcaycagtcatcattgaatttggcaaggg

SEQ ID NO: 3524 - DNA, 51 bp, Homo sapiens; identical to SEQ ID NO: 2577

SEQ ID NO: 3525 - DNA, 51 bp, Homo sapiens; identical to SEQ ID NO: 3272

SEQ ID NO: 3526 - DNA, 51 bp, Homo sapiens; identical to SEQ ID NO: 2311

SEQ ID NO: 3527 - DNA, 51 bp, Homo sapiens; identical to SEQ ID NO: 3300

SEQ ID NO: 3528 - DNA, 51 bp, Homo sapiens
gcagggcaatgacttatccaagttayatagcagttaagttatacaggctag

SEQ ID NO: 3529 - DNA, 51 bp, Homo sapiens
accctggaggtcagagacctcaactrccaggtagaggcacgcctgggttca

SEQ ID NO: 3530 - DNA, 51 bp, Homo sapiens; identical to SEQ ID NO: 3213

SEQ ID NO: 3531 - DNA, 51 bp, Homo sapiens
caatgtgaaccaaagcactgggtagrgctcaaaggatagaaaaagtactta

SEQ ID NO: 3532 - DNA, 51 bp, Homo sapiens; identical to SEQ ID NO: 1962

SEQ ID NO: 3533 - DNA, 51 bp, Homo sapiens; identical to SEQ ID NO: 1709

SEQ ID NO: 3534 - DNA, 51 bp, Homo sapiens; identical to SEQ ID NO: 2373

SEQ ID NO: 3535 - DNA, 51 bp, Homo sapiens; identical to SEQ ID NO: 2871

SEQ ID NO: 3536 - DNA, 51 bp, Homo sapiens
agctggtgaggaagaagccaaggggrgcaagcggcccaaggaaggcctgct

SEQ ID NO: 3537 - DNA, 51 bp, Homo sapiens
atgtttccaaattccacattccttarcttacctctctgtgaaatggagaca

SEQ ID NO: 3538 - DNA, 51 bp, Homo sapiens
atccacaaataacgcactatgagttyttctctggtttgtatgttctttcaa

SEQ ID NO: 3539 - DNA, 51 bp, Homo sapiens; identical to SEQ ID NO: 1162

SEQ ID NO: 3540 - DNA, 51 bp, Homo sapiens
ctggctgggattcctaaaacgccaakgtcttttaaaaggcaaaagggctga

SEQ ID NO: 3541 - DNA, 51 bp, Homo sapiens; identical to SEQ ID NO: 2910

SEQ ID NO: 3542 - DNA, 51 bp, Homo sapiens; identical to SEQ ID NO: 3473

SEQ ID NO: 3543 - DNA, 51 bp, Homo sapiens; identical to SEQ ID NO: 126

SEQ ID NO: 3544 - DNA, 51 bp, Homo sapiens; identical to SEQ ID NO: 714

SEQ ID NO: 3545 - DNA, 51 bp, Homo sapiens; identical to SEQ ID NO: 223

SEQ ID NO: 3546 - DNA, 51 bp, Homo sapiens; identical to SEQ ID NO: 133

SEQ ID NO: 3547 - DNA, 51 bp, Homo sapiens; identical to SEQ ID NO: 352

SEQ ID NO: 3548 - DNA, 51 bp, Homo sapiens
gctatgtggagccagagagcaggtarcaaattatgtcactgagcacgtgct

SEQ ID NO: 3549 - DNA, 51 bp, Homo sapiens; identical to SEQ ID NO: 91

SEQ ID NO: 3550 - DNA, 51 bp, Homo sapiens; identical to SEQ ID NO: 1215

SEQ ID NO: 3551 - DNA, 51 bp, Homo sapiens; identical to SEQ ID NO: 3274

SEQ ID NO: 3552 - DNA, 51 bp, Homo sapiens; identical to SEQ ID NO: 870

SEQ ID NO: 3553 - DNA, 51 bp, Homo sapiens; identical to SEQ ID NO: 345

SEQ ID NO: 3554 - DNA, 51 bp, Homo sapiens; identical to SEQ ID NO: 2179

SEQ ID NO: 3555 - DNA, 51 bp, Homo sapiens
atgaaaatatcctacgatggtattartccttgtactaggatgaaagacaat

SEQ ID NO: 3556 - DNA, 51 bp, Homo sapiens; identical to SEQ ID NO: 1219

SEQ ID NO: 3557 - DNA, 51 bp, Homo sapiens; identical to SEQ ID NO: 2856

SEQ ID NO: 3558 - DNA, 51 bp, Homo sapiens; identical to SEQ ID NO: 3146

SEQ ID NO: 3559 - DNA, 51 bp, Homo sapiens; identical to SEQ ID NO: 3227

SEQ ID NO: 3560 - DNA, 51 bp, Homo sapiens; identical to SEQ ID NO: 2656

SEQ ID NO: 3561 - DNA, 51 bp, Homo sapiens
caagattgcagctccttattgaggaraacagtcctcagagatccagagtca

SEQ ID NO: 3562 - DNA, 51 bp, Homo sapiens; identical to SEQ ID NO: 1246

SEQ ID NO: 3563 - DNA, 51 bp, Homo sapiens
tggagtcagccacaccacttccttayggctctcggtctccttagcagccgt

SEQ ID NO: 3564 - DNA, 51 bp, Homo sapiens; identical to SEQ ID NO: 3210

SEQ ID NO: 3565 - DNA, 51 bp, Homo sapiens
cccctactaaaaccatatctattacrttacccagcatagtaaagattgatg

SEQ ID NO: 3566 - DNA, 51 bp, Homo sapiens; identical to SEQ ID NO: 65

SEQ ID NO: 3567 - DNA, 51 bp, Homo sapiens
acagatttatgaagacacctgtgaayggagagactatagtagggtagagag

SEQ ID NO: 3568 - DNA, 51 bp, Homo sapiens; identical to SEQ ID NO: 1298

SEQ ID NO: 3569 - DNA, 51 bp, Homo sapiens; identical to SEQ ID NO: 2361

SEQ ID NO: 3570 - DNA, 51 bp, Homo sapiens; identical to SEQ ID NO: 3232

SEQ ID NO: 3571 - DNA, 51 bp, Homo sapiens; identical to SEQ ID NO: 1265

SEQ ID NO: 3572 - DNA, 51 bp, Homo sapiens; identical to SEQ ID NO: 670

SEQ ID NO: 3573 - DNA, 51 bp, Homo sapiens
agaagtcagaagctgataaacgtggrcttacacctttagcacggatagttt

SEQ ID NO: 3574 - DNA, 51 bp, Homo sapiens; identical to SEQ ID NO: 1047

SEQ ID NO: 3575 - DNA, 51 bp, Homo sapiens; identical to SEQ ID NO: 2300

SEQ ID NO: 3576 - DNA, 51 bp, Homo sapiens; identical to SEQ ID NO: 1530

SEQ ID NO: 3577 - DNA, 51 bp, Homo sapiens; identical to SEQ ID NO: 1688

SEQ ID NO: 3578 - DNA, 51 bp, Homo sapiens; identical to SEQ ID NO: 2082

SEQ ID NO: 3579 - DNA, 51 bp, Homo sapiens; identical to SEQ ID NO: 1189

SEQ ID NO: 3580 - DNA, 51 bp, Homo sapiens; identical to SEQ ID NO: 88

SEQ ID NO: 3581 - DNA, 51 bp, Homo sapiens; identical to SEQ ID NO: 37

SEQ ID NO: 3582 - DNA, 51 bp, Homo sapiens; identical to SEQ ID NO: 1578

SEQ ID NO: 3583 - DNA, 51 bp, Homo sapiens; identical to SEQ ID NO: 3351

SEQ ID NO: 3584 - DNA, 51 bp, Homo sapiens
ctctggtcgaggccagtctgcacatytcctgaggcttctgcttctgggacc

SEQ ID NO: 3585 - DNA, 51 bp, Homo sapiens
ctagatgaggtgctagaggccaactrctgtgattctgctgtggatggaacg

SEQ ID NO: 3586 - DNA, 51 bp, Homo sapiens
gaacccactgaaagaacagctagccrgcaggcacctcctcacatcgagctc

SEQ ID NO: 3587 - DNA, 51 bp, Homo sapiens
ttttagaggatgctcattggcatttrtgtttataatcacgtggctgttgat

SEQ ID NO: 3588 - DNA, 51 bp, Homo sapiens; identical to SEQ ID NO: 435

SEQ ID NO: 3589 - DNA, 51 bp, Homo sapiens
acaggagatggcatatcgatgcaaakgacccaaaaaatagggccagattta

SEQ ID NO: 3590 - DNA, 51 bp, Homo sapiens
aggatttacaccattatactacagaygttcattatgccctttaacttgccc

SEQ ID NO: 3591 - DNA, 51 bp, Homo sapiens; identical to SEQ ID NO: 575

SEQ ID NO: 3592 - DNA, 51 bp, Homo sapiens
attattttagctattaagagtgtgtkgagcagcaagtattcccaaagcgtg

SEQ ID NO: 3593 - DNA, 51 bp, Homo sapiens; identical to SEQ ID NO: 1255

SEQ ID NO: 3594 - DNA, 51 bp, Homo sapiens
ccctgaaaagttggtattttcttccstatcggtccttcatcattgaacatg

SEQ ID NO: 3595 - DNA, 51 bp, Homo sapiens
atccagagagacccgaggttttaggkccaggagagactgaactgggcccgt

SEQ ID NO: 3596 - DNA, 51 bp, Homo sapiens
acatgtagcttctaagatagatcagrtccctcacttgccagaagtaagcct

SEQ ID NO: 3597 - DNA, 51 bp, Homo sapiens; identical to SEQ ID NO: 804

SEQ ID NO: 3598 - DNA, 51 bp, Homo sapiens
ctgctgaaagatcaacatgaatgaargcaagtatgtgaccatggcatcata

SEQ ID NO: 3599 - DNA, 51 bp, Homo sapiens; identical to SEQ ID NO: 2135

SEQ ID NO: 3600 - DNA, 51 bp, Homo sapiens; identical to SEQ ID NO: 668

SEQ ID NO: 3601 - DNA, 51 bp, Homo sapiens; identical to SEQ ID NO: 3306

SEQ ID NO: 3602 - DNA, 51 bp, Homo sapiens
tctggatatctgtgacctagaaatcyggagtacagcaccctgggggctctt

SEQ ID NO: 3603 - DNA, 51 bp, Homo sapiens; identical to SEQ ID NO: 802

SEQ ID NO: 3604 - DNA, 51 bp, Homo sapiens
atgaaagagttgatgactcagtaatrttaacatgagagagattaacatgca

SEQ ID NO: 3605 - DNA, 51 bp, Homo sapiens
ttacaaatctggagataaccaaatcrtttttcggatttaagtgaagacact

SEQ ID NO: 3606 - DNA, 51 bp, Homo sapiens
ttcaagcagtgttcttctccgtgtcrttctaggctcttcctctttatggat

SEQ ID NO: 3607 - DNA, 51 bp, Homo sapiens
gcttacacttacctgatcagcaaaastaactataccctgtatctcaaatga

SEQ ID NO: 3608 - DNA, 51 bp, Homo sapiens; identical to SEQ ID NO: 493

SEQ ID NO: 3609 - DNA, 51 bp, Homo sapiens; identical to SEQ ID NO: 397

SEQ ID NO: 3610 - DNA, 51 bp, Homo sapiens; identical to SEQ ID NO: 1077

SEQ ID NO: 3611 - DNA, 51 bp, Homo sapiens; identical to SEQ ID NO: 803

SEQ ID NO: 3612 - DNA, 51 bp, Homo sapiens
tatatactaatgctgtgcttgatacwcaatgagtgcttcataaatgcttgc

SEQ ID NO: 3613 - DNA, 51 bp, Homo sapiens
taagacaagcaaacagtgctccattktaacctccctaattactaatttcaa

SEQ ID NO: 3614 - DNA, 51 bp, Homo sapiens
gcaagaggtcttcttgattatgctaytggtgcaattggatcagtgtatgat

SEQ ID NO: 3615 - DNA, 51 bp, Homo sapiens; identical to SEQ ID NO: 2693

SEQ ID NO: 3616 - DNA, 51 bp, Homo sapiens; identical to SEQ ID NO: 631

SEQ ID NO: 3617 - DNA, 51 bp, Homo sapiens; identical to SEQ ID NO: 3106

SEQ ID NO: 3618 - DNA, 51 bp, Homo sapiens; identical to SEQ ID NO: 1328

SEQ ID NO: 3619 - DNA, 51 bp, Homo sapiens; identical to SEQ ID NO: 666

SEQ ID NO: 3620 - DNA, 51 bp, Homo sapiens; identical to SEQ ID NO: 594

SEQ ID NO: 3621 - DNA, 51 bp, Homo sapiens; identical to SEQ ID NO: 1503

SEQ ID NO: 3622 - DNA, 51 bp, Homo sapiens; identical to SEQ ID NO: 3382

SEQ ID NO: 3623 - DNA, 51 bp, Homo sapiens; identical to SEQ ID NO: 1347

SEQ ID NO: 3624 - DNA, 51 bp, Homo sapiens; identical to SEQ ID NO: 805

SEQ ID NO: 3625 - DNA, 51 bp, Homo sapiens
gctagcttacaatcacggcaacaagmagttaattctagacatactgacagc

SEQ ID NO: 3626 - DNA, 51 bp, Homo sapiens; identical to SEQ ID NO: 3164

SEQ ID NO: 3627 - DNA, 51 bp, Homo sapiens; identical to SEQ ID NO: 1924

SEQ ID NO: 3628 - DNA, 51 bp, Homo sapiens; identical to SEQ ID NO: 3246

SEQ ID NO: 3629 - DNA, 51 bp, Homo sapiens; identical to SEQ ID NO: 440

SEQ ID NO: 3630 - DNA, 51 bp, Homo sapiens
tccccctaagagattttgactctgcratccaacctcaaccacacgggagag

SEQ ID NO: 3631 - DNA, 51 bp, Homo sapiens; identical to SEQ ID NO: 408

SEQ ID NO: 3632 - DNA, 51 bp, Homo sapiens; identical to SEQ ID NO: 3327

SEQ ID NO: 3633 - DNA, 51 bp, Homo sapiens; identical to SEQ ID NO: 669

SEQ ID NO: 3634 - DNA, 51 bp, Homo sapiens; identical to SEQ ID NO: 177

SEQ ID NO: 3635 - DNA, 51 bp, Homo sapiens
attatgggactgctatcttagcctastagaatggaatcagcatggggatcc

SEQ ID NO: 3636 - DNA, 51 bp, Homo sapiens; identical to SEQ ID NO: 653

SEQ ID NO: 3637 - DNA, 51 bp, Homo sapiens
caagaatcacctcctaaataaacacrtattatgcaaattgatacgtgagtt

SEQ ID NO: 3638 - DNA, 51 bp, Homo sapiens; identical to SEQ ID NO: 951

SEQ ID NO: 3639 - DNA, 51 bp, Homo sapiens; identical to SEQ ID NO: 2308

SEQ ID NO: 3640 - DNA, 51 bp, Homo sapiens; identical to SEQ ID NO: 128

SEQ ID NO: 3641 - DNA, 51 bp, Homo sapiens
agagaagatgaaaaactatccttcgycatggtgtcaggtaatgtgttgaaa

SEQ ID NO: 3642 - DNA, 51 bp, Homo sapiens; identical to SEQ ID NO: 2301

SEQ ID NO: 3643 - DNA, 51 bp, Homo sapiens
cacttggattttcttctgcctctgcygaccctgacagagcaagaccaaccc

SEQ ID NO: 3644 - DNA, 51 bp, Homo sapiens; identical to SEQ ID NO: 163

SEQ ID NO: 3645 - DNA, 51 bp, Homo sapiens
ccagtgtagaattgcagacgtggaargttaaaacaaggtacattgatataa

SEQ ID NO: 3646 - DNA, 51 bp, Homo sapiens; identical to SEQ ID NO: 985

SEQ ID NO: 3647 - DNA, 51 bp, Homo sapiens
ctggcaggcctggcttttgccattcragactggcatatcctccagctggtg

SEQ ID NO: 3648 - DNA, 51 bp, Homo sapiens; identical to SEQ ID NO: 1780

SEQ ID NO: 3649 - DNA, 51 bp, Homo sapiens
gtaaagtataacggagtctaccattktattgggtacatgagaaacaaataa

SEQ ID NO: 3650 - DNA, 51 bp, Homo sapiens; identical to SEQ ID NO: 607

SEQ ID NO: 3651 - DNA, 51 bp, Homo sapiens
agagaatgacagagttgccctttacrttgcaagtaagtcctgatggcgaga

SEQ ID NO: 3652 - DNA, 51 bp, Homo sapiens
agagtgaatgcggggtgtgtgcgaayattttttgagtgccttgggtatctg

SEQ ID NO: 3653 - DNA, 51 bp, Homo sapiens
taccaatcttctaataattagcacayagcttgattctcaacattgtctgca

SEQ ID NO: 3654 - DNA, 51 bp, Homo sapiens; identical to SEQ ID NO: 328

SEQ ID NO: 3655 - DNA, 51 bp, Homo sapiens; identical to SEQ ID NO: 471

SEQ ID NO: 3656 - DNA, 51 bp, Homo sapiens
tctttccagaggattcctttgcaaayaaagttctaaaccatttgaggaaaa

SEQ ID NO: 3657 - DNA, 51 bp, Homo sapiens
cagttttcaatattgaagtcttcatrgtgaatcggctgattctgataatag

SEQ ID NO: 3658 - DNA, 51 bp, Homo sapiens; identical to SEQ ID NO: 3324

SEQ ID NO: 3659 - DNA, 51 bp, Homo sapiens; identical to SEQ ID NO: 1444

SEQ ID NO: 3660 - DNA, 51 bp, Homo sapiens; identical to SEQ ID NO: 1123

SEQ ID NO: 3661 - DNA, 51 bp, Homo sapiens; identical to SEQ ID NO: 2072

SEQ ID NO: 3662 - DNA, 51 bp, Homo sapiens; identical to SEQ ID NO: 120

SEQ ID NO: 3663 - DNA, 51 bp, Homo sapiens; identical to SEQ ID NO: 1223

SEQ ID NO: 3664 - DNA, 51 bp, Homo sapiens; identical to SEQ ID NO: 806

SEQ ID NO: 3665 - DNA, 51 bp, Homo sapiens; identical to SEQ ID NO: 89

SEQ ID NO: 3666 - DNA, 51 bp, Homo sapiens
gctgagtttcctccagggaagccctstttgcgtgcctatccacctgtctca

SEQ ID NO: 3667 - DNA, 51 bp, Homo sapiens; identical to SEQ ID NO: 2553

SEQ ID NO: 3668 - DNA, 51 bp, Homo sapiens; identical to SEQ ID NO: 1597

SEQ ID NO: 3669 - DNA, 51 bp, Homo sapiens
attttgctactagctttctgcctctmtttttcccactgagagatattgtag

SEQ ID NO: 3670 - DNA, 51 bp, Homo sapiens; identical to SEQ ID NO: 3017

SEQ ID NO: 3671 - DNA, 51 bp, Homo sapiens; identical to SEQ ID NO: 3142

SEQ ID NO: 3672 - DNA, 51 bp, Homo sapiens
tcaatttctactctagtatttttccrtgataacgtactgtgagtcatcttt

SEQ ID NO: 3673 - DNA, 51 bp, Homo sapiens
cccagcaatccagggattccaggtgktcccatgtcacctttcttcccctga

SEQ ID NO: 3674 - DNA, 51 bp, Homo sapiens; identical to SEQ ID NO: 367

SEQ ID NO: 3675 - DNA, 51 bp, Homo sapiens
catctggcctgtgataaatgctgacyggcttcctcggctcgcagtgacttt

SEQ ID NO: 3676 - DNA, 51 bp, Homo sapiens; identical to SEQ ID NO: 1690

SEQ ID NO: 3677 - DNA, 51 bp, Homo sapiens
tttaagagtaataatattgacaactmcctggcaaaacattaaaaaatggag

SEQ ID NO: 3678 - DNA, 51 bp, Homo sapiens
actctccacgttggattccaggtccragtggctatctgggctgtcgctctc

SEQ ID NO: 3679 - DNA, 51 bp, Homo sapiens
gccagggctatgtctgtttttcaagygtgaaatgagactgaatccagaggt

SEQ ID NO: 3680 - DNA, 51 bp, Homo sapiens
ttaaatttcctttgttttatatatgrcctattaacctcaatggagaaagag

SEQ ID NO: 3681 - DNA, 51 bp, Homo sapiens; identical to SEQ ID NO: 1179

SEQ ID NO: 3682 - DNA, 51 bp, Homo sapiens; identical to SEQ ID NO: 2368

SEQ ID NO: 3683 - DNA, 51 bp, Homo sapiens
tgggtgtctgaacattttctgaaacygctccacatcatccgcccaggcctg

SEQ ID NO: 3684 - DNA, 51 bp, Homo sapiens
caaccactatgccctcaccatctgcrcaactgctttggagctgcagatcag

SEQ ID NO: 3685 - DNA, 51 bp, Homo sapiens; identical to SEQ ID NO: 975

SEQ ID NO: 3686 - DNA, 51 bp, Homo sapiens; identical to SEQ ID NO: 860

SEQ ID NO: 3687 - DNA, 51 bp, Homo sapiens; identical to SEQ ID NO: 3407

SEQ ID NO: 3688 - DNA, 51 bp, Homo sapiens; identical to SEQ ID NO: 812

SEQ ID NO: 3689 - DNA, 51 bp, Homo sapiens; identical to SEQ ID NO: 1987

SEQ ID NO: 3690 - DNA, 51 bp, Homo sapiens
acacagacatgtataacagaaaaaaktcaaagtatgatatgatatgcttta

SEQ ID NO: 3691 - DNA, 51 bp, Homo sapiens; identical to SEQ ID NO: 698

SEQ ID NO: 3692 - DNA, 51 bp, Homo sapiens
gtatgtgttcatataatcaactgcamgtataaacagacgtttgaaagcagc

SEQ ID NO: 3693 - DNA, 51 bp, Homo sapiens; identical to SEQ ID NO: 1254

SEQ ID NO: 3694 - DNA, 51 bp, Homo sapiens; identical to SEQ ID NO: 1263

SEQ ID NO: 3695 - DNA, 51 bp, Homo sapiens
ggaaaaagagtctgaggatggtccartttcctgggatcaggtattgccatt

SEQ ID NO: 3696 - DNA, 51 bp, Homo sapiens
ccaacagcaataaacagcagcattcrtgatctaaatgaagcttttaaaatt

SEQ ID NO: 3697 - DNA, 51 bp, Homo sapiens; identical to SEQ ID NO: 1080

SEQ ID NO: 3698 - DNA, 51 bp, Homo sapiens
aatcattaacgaatcgagatactacragttaatagcataggagatactgaa

SEQ ID NO: 3699 - DNA, 51 bp, Homo sapiens; identical to SEQ ID NO: 992

SEQ ID NO: 3700 - DNA, 51 bp, Homo sapiens; identical to SEQ ID NO: 10

SEQ ID NO: 3701 - DNA, 51 bp, Homo sapiens; identical to SEQ ID NO: 1114

SEQ ID NO: 3702 - DNA, 51 bp, Homo sapiens; identical to SEQ ID NO: 500

SEQ ID NO: 3703 - DNA, 51 bp, Homo sapiens; identical to SEQ ID NO: 505

SEQ ID NO: 3704 - DNA, 51 bp, Homo sapiens; identical to SEQ ID NO: 721

SEQ ID NO: 3705 - DNA, 51 bp, Homo sapiens; identical to SEQ ID NO: 2388

SEQ ID NO: 3706 - DNA, 51 bp, Homo sapiens; identical to SEQ ID NO: 741

SEQ ID NO: 3707 - DNA, 51 bp, Homo sapiens; identical to SEQ ID NO: 956

SEQ ID NO: 3708 - DNA, 51 bp, Homo sapiens
agataaacctaactaccagcattccrggaagctgaatggaagaaggggaat

SEQ ID NO: 3709 - DNA, 51 bp, Homo sapiens
tggaagtgcgtctgcccggggcttgmagattgttaggcagaagggtgaatg

SEQ ID NO: 3710 - DNA, 51 bp, Homo sapiens; identical to SEQ ID NO: 598

SEQ ID NO: 3711 - DNA, 51 bp, Homo sapiens; identical to SEQ ID NO: 606

SEQ ID NO: 3712 - DNA, 51 bp, Homo sapiens; identical to SEQ ID NO: 1230

SEQ ID NO: 3713 - DNA, 51 bp, Homo sapiens; identical to SEQ ID NO: 19

SEQ ID NO: 3714 - DNA, 51 bp, Homo sapiens; identical to SEQ ID NO: 1500

SEQ ID NO: 3715 - DNA, 51 bp, Homo sapiens; identical to SEQ ID NO: 1874

SEQ ID NO: 3716 - DNA, 51 bp, Homo sapiens; identical to SEQ ID NO: 618

SEQ ID NO: 3717 - DNA, 51 bp, Homo sapiens; identical to SEQ ID NO: 1258

SEQ ID NO: 3718 - DNA, 51 bp, Homo sapiens
acagctcgctgggcatctttctgcastagcctgtcagcatgctggaagcag

SEQ ID NO: 3719 - DNA, 51 bp, Homo sapiens; identical to SEQ ID NO: 1244

SEQ ID NO: 3720 - DNA, 51 bp, Homo sapiens; identical to SEQ ID NO: 1813

SEQ ID NO: 3721 - DNA, 51 bp, Homo sapiens; identical to SEQ ID NO: 3299

SEQ ID NO: 3722 - DNA, 51 bp, Homo sapiens; identical to SEQ ID NO: 2394

SEQ ID NO: 3723 - DNA, 51 bp, Homo sapiens; identical to SEQ ID NO: 38

SEQ ID NO: 3724 - DNA, 51 bp, Homo sapiens; identical to SEQ ID NO: 836

SEQ ID NO: 3725 - DNA, 51 bp, Homo sapiens; identical to SEQ ID NO: 2382

SEQ ID NO: 3726 - DNA, 51 bp, Homo sapiens; identical to SEQ ID NO: 3099

SEQ ID NO: 3727 - DNA, 51 bp, Homo sapiens
agagcggtgtagccgtctgaggtcayggcctccttgccagcgccccgatgc

SEQ ID NO: 3728 - DNA, 51 bp, Homo sapiens; identical to SEQ ID NO: 884

SEQ ID NO: 3729 - DNA, 51 bp, Homo sapiens; identical to SEQ ID NO: 1188

SEQ ID NO: 3730 - DNA, 51 bp, Homo sapiens; identical to SEQ ID NO: 295

SEQ ID NO: 3731 - DNA, 51 bp, Homo sapiens
gtattttttctacatgctttaccackcttagaaaagattgtttcatgttat

SEQ ID NO: 3732 - DNA, 51 bp, Homo sapiens
gtgtctttattaaaggttactggaaraaacaatgttaggggctccaagata

SEQ ID NO: 3733 - DNA, 51 bp, Homo sapiens
gaaactacagttgctgcttactattygaaagactgtcaaaggagtggccat

SEQ ID NO: 3734 - DNA, 51 bp, Homo sapiens; identical to SEQ ID NO: 787

SEQ ID NO: 3735 - DNA, 51 bp, Homo sapiens
ttccagactttcctttttttcccatwgagtaaagccagggtaacataaaga

SEQ ID NO: 3736 - DNA, 51 bp, Homo sapiens
ttaaattcagcttcctcatgggtcaracgatgctatcagccctatcatttt

SEQ ID NO: 3737 - DNA, 51 bp, Homo sapiens; identical to SEQ ID NO: 1196

SEQ ID NO: 3738 - DNA, 51 bp, Homo sapiens; identical to SEQ ID NO: 27

SEQ ID NO: 3739 - DNA, 51 bp, Homo sapiens; identical to SEQ ID NO: 503

SEQ ID NO: 3740 - DNA, 51 bp, Homo sapiens
gcttgatacttggcctacagcattaytagcaacaaacgtgtaagttccttc

SEQ ID NO: 3741 - DNA, 51 bp, Homo sapiens
tctgggtcctcctccagcgtcgtgcrgtgatgctgaggtgcatttttgact

SEQ ID NO: 3742 - DNA, 51 bp, Homo sapiens; identical to SEQ ID NO: 642

SEQ ID NO: 3743 - DNA, 51 bp, Homo sapiens; identical to SEQ ID NO: 1642

SEQ ID NO: 3744 - DNA, 51 bp, Homo sapiens
tctttgcaaagtgctctctaaagtcrtttttggcccattggccctattcca

SEQ ID NO: 3745 - DNA, 51 bp, Homo sapiens; identical to SEQ ID NO: 49

SEQ ID NO: 3746 - DNA, 51 bp, Homo sapiens; identical to SEQ ID NO: 603

SEQ ID NO: 3747 - DNA, 51 bp, Homo sapiens
ggttcctccctgtcctcagagctttraactagagaagagagaataatcaca

SEQ ID NO: 3748 - DNA, 51 bp, Homo sapiens
taagtgataaaatattttagaatgtrgaactattgccaaatggggtgtact

SEQ ID NO: 3749 - DNA, 51 bp, Homo sapiens; identical to SEQ ID NO: 245

SEQ ID NO: 3750 - DNA, 51 bp, Homo sapiens; identical to SEQ ID NO: 36

SEQ ID NO: 3751 - DNA, 51 bp, Homo sapiens; identical to SEQ ID NO: 2208

SEQ ID NO: 3752 - DNA, 51 bp, Homo sapiens; identical to SEQ ID NO: 1807

SEQ ID NO: 3753 - DNA, 51 bp, Homo sapiens
atgtagggacaataattttcatatcrtaaaggaggaaaaaaagtaataaca

SEQ ID NO: 3754 - DNA, 51 bp, Homo sapiens; identical to SEQ ID NO: 1776

SEQ ID NO: 3755 - DNA, 51 bp, Homo sapiens; identical to SEQ ID NO: 1817

SEQ ID NO: 3756 - DNA, 51 bp, Homo sapiens
ttgggctgtggtcttccggatatcayggcacagaagcgggcaggcttgcca

SEQ ID NO: 3757 - DNA, 51 bp, Homo sapiens
aaggaggagaacccttccaaaaaagyctttgaggaatgtactaggtaagtg

SEQ ID NO: 3758 - DNA, 51 bp, Homo sapiens
aagtgcaatgagaagcactgaggggygagaaccatccatgactaagcactg

SEQ ID NO: 3759 - DNA, 51 bp, Homo sapiens; identical to SEQ ID NO: 35

SEQ ID NO: 3760 - DNA, 51 bp, Homo sapiens
ccactcgctggtgaccatgaagatcwtgcacgactgtgtgcagctgagcac

SEQ ID NO: 3761 - DNA, 51 bp, Homo sapiens; identical to SEQ ID NO: 3154

SEQ ID NO: 3762 - DNA, 51 bp, Homo sapiens; identical to SEQ ID NO: 2225

SEQ ID NO: 3763 - DNA, 51 bp, Homo sapiens; identical to SEQ ID NO: 856

SEQ ID NO: 3764 - DNA, 51 bp, Homo sapiens
gtgtttaattctcaattaattccaarcaaggacagtaaagaggcctgttat

SEQ ID NO: 3765 - DNA, 51 bp, Homo sapiens; identical to SEQ ID NO: 442

SEQ ID NO: 3766 - DNA, 51 bp, Homo sapiens; identical to SEQ ID NO: 1233

SEQ ID NO: 3767 - DNA, 51 bp, Homo sapiens; identical to SEQ ID NO: 2070

SEQ ID NO: 3768 - DNA, 51 bp, Homo sapiens
agcgtctctgcctagctctcaagagrttcacagcctgtggcaaggcaaagc

SEQ ID NO: 3769 - DNA, 51 bp, Homo sapiens
attttttgaacctatgaaattaagargtttgataagatgacattcttgatc

SEQ ID NO: 3770 - DNA, 51 bp, Homo sapiens; identical to SEQ ID NO: 3120

SEQ ID NO: 3771 - DNA, 51 bp, Homo sapiens; identical to SEQ ID NO: 530

SEQ ID NO: 3772 - DNA, 51 bp, Homo sapiens; identical to SEQ ID NO: 1046

SEQ ID NO: 3773 - DNA, 51 bp, Homo sapiens; identical to SEQ ID NO: 2255

SEQ ID NO: 3774 - DNA, 51 bp, Homo sapiens; identical to SEQ ID NO: 1356

SEQ ID NO: 3775 - DNA, 51 bp, Homo sapiens; identical to SEQ ID NO: 1735

SEQ ID NO: 3776 - DNA, 51 bp, Homo sapiens; identical to SEQ ID NO: 1306

SEQ ID NO: 3777 - DNA, 51 bp, Homo sapiens; identical to SEQ ID NO: 97

SEQ ID NO: 3778 - DNA, 51 bp, Homo sapiens; identical to SEQ ID NO: 2593

SEQ ID NO: 3779 - DNA, 51 bp, Homo sapiens; identical to SEQ ID NO: 989

SEQ ID NO: 3780 - DNA, 51 bp, Homo sapiens; identical to SEQ ID NO: 2834

SEQ ID NO: 3781 - DNA, 51 bp, Homo sapiens; identical to SEQ ID NO: 3139

SEQ ID NO: 3782 - DNA, 51 bp, Homo sapiens; identical to SEQ ID NO: 1134

SEQ ID NO: 3783 - DNA, 51 bp, Homo sapiens; identical to SEQ ID NO: 1288

SEQ ID NO: 3784 - DNA, 51 bp, Homo sapiens; identical to SEQ ID NO: 3138

SEQ ID NO: 3785 - DNA, 51 bp, Homo sapiens; identical to SEQ ID NO: 1627

SEQ ID NO: 3786 - DNA, 51 bp, Homo sapiens; identical to SEQ ID NO: 788

SEQ ID NO: 3787 - DNA, 51 bp, Homo sapiens; identical to SEQ ID NO: 1576

SEQ ID NO: 3788 - DNA, 51 bp, Homo sapiens; identical to SEQ ID NO: 61

SEQ ID NO: 3789 - DNA, 51 bp, Homo sapiens; identical to SEQ ID NO: 503

SEQ ID NO: 3790 - DNA, 51 bp, Homo sapiens; identical to SEQ ID NO: 3154

SEQ ID NO: 3791 - DNA, 51 bp, Homo sapiens; identical to SEQ ID NO: 1156

SEQ ID NO: 3792 - DNA, 51 bp, Homo sapiens; identical to SEQ ID NO: 2933

SEQ ID NO: 3793 - DNA, 51 bp, Homo sapiens; identical to SEQ ID NO: 2272

SEQ ID NO: 3794 - DNA, 51 bp, Homo sapiens; identical to SEQ ID NO: 120

SEQ ID NO: 3795 - DNA, 51 bp, Homo sapiens; identical to SEQ ID NO: 243

SEQ ID NO: 3796 - DNA, 51 bp, Homo sapiens; identical to SEQ ID NO: 1465

SEQ ID NO: 3797 - DNA, 51 bp, Homo sapiens; identical to SEQ ID NO: 3146

SEQ ID NO: 3798 - DNA, 51 bp, Homo sapiens; identical to SEQ ID NO: 3147

SEQ ID NO: 3799 - DNA, 51 bp, Homo sapiens; identical to SEQ ID NO: 2422

SEQ ID NO: 3800 - DNA, 51 bp, Homo sapiens; identical to SEQ ID NO: 1392

SEQ ID NO: 3801 - DNA, 51 bp, Homo sapiens; identical to SEQ ID NO: 1274

SEQ ID NO: 3802 - DNA, 51 bp, Homo sapiens; identical to SEQ ID NO: 3244

SEQ ID NO: 3803 - DNA, 51 bp, Homo sapiens; identical to SEQ ID NO: 795

SEQ ID NO: 3804 - DNA, 51 bp, Homo sapiens; identical to SEQ ID NO: 1143

SEQ ID NO: 3805 - DNA, 51 bp, Homo sapiens; identical to SEQ ID NO: 1461

SEQ ID NO: 3806 - DNA, 51 bp, Homo sapiens; identical to SEQ ID NO: 2818

SEQ ID NO: 3807 - DNA, 51 bp, Homo sapiens; identical to SEQ ID NO: 229

SEQ ID NO: 3808 - DNA, 51 bp, Homo sapiens; identical to SEQ ID NO: 58

SEQ ID NO: 3809 - DNA, 51 bp, Homo sapiens; identical to SEQ ID NO: 3013

SEQ ID NO: 3810 - DNA, 51 bp, Homo sapiens; identical to SEQ ID NO: 3142

SEQ ID NO: 3811 - DNA, 51 bp, Homo sapiens; identical to SEQ ID NO: 116

SEQ ID NO: 3812 - DNA, 51 bp, Homo sapiens; identical to SEQ ID NO: 3140

SEQ ID NO: 3813 - DNA, 51 bp, Homo sapiens; identical to SEQ ID NO: 2382

SEQ ID NO: 3814 - DNA, 51 bp, Homo sapiens; identical to SEQ ID NO: 241

SEQ ID NO: 3815 - DNA, 51 bp, Homo sapiens; identical to SEQ ID NO: 1159

SEQ ID NO: 3816 - DNA, 51 bp, Homo sapiens; identical to SEQ ID NO: 3155

SEQ ID NO: 3817 - DNA, 51 bp, Homo sapiens; identical to SEQ ID NO: 155

SEQ ID NO: 3818 - DNA, 51 bp, Homo sapiens; identical to SEQ ID NO: 3187

SEQ ID NO: 3819 - DNA, 51 bp, Homo sapiens; identical to SEQ ID NO: 1047

SEQ ID NO: 3820 - DNA, 51 bp, Homo sapiens; identical to SEQ ID NO: 1813

SEQ ID NO: 3821 - DNA, 51 bp, Homo sapiens; identical to SEQ ID NO: 126

SEQ ID NO: 3822 - DNA, 51 bp, Homo sapiens; identical to SEQ ID NO: 3201

SEQ ID NO: 3823 - DNA, 51 bp, Homo sapiens; identical to SEQ ID NO: 2936

SEQ ID NO: 3824 - DNA, 51 bp, Homo sapiens; identical to SEQ ID NO: 8

SEQ ID NO: 3825 - DNA, 51 bp, Homo sapiens; identical to SEQ ID NO: 2855

SEQ ID NO: 3826 - DNA, 51 bp, Homo sapiens; identical to SEQ ID NO: 352

SEQ ID NO: 3827 - DNA, 51 bp, Homo sapiens; identical to SEQ ID NO: 500

SEQ ID NO: 3828 - DNA, 51 bp, Homo sapiens; identical to SEQ ID NO: 3211

SEQ ID NO: 3829 - DNA, 51 bp, Homo sapiens; identical to SEQ ID NO: 2881

SEQ ID NO: 3830 - DNA, 51 bp, Homo sapiens; identical to SEQ ID NO: 3193

SEQ ID NO: 3831 - DNA, 51 bp, Homo sapiens; identical to SEQ ID NO: 3192

SEQ ID NO: 3832 - DNA, 51 bp, Homo sapiens; identical to SEQ ID NO: 183

SEQ ID NO: 3833 - DNA, 51 bp, Homo sapiens; identical to SEQ ID NO: 179

SEQ ID NO: 3834 - DNA, 51 bp, Homo sapiens; identical to SEQ ID NO: 2741

SEQ ID NO: 3835 - DNA, 51 bp, Homo sapiens; identical to SEQ ID NO: 1537

SEQ ID NO: 3836 - DNA, 51 bp, Homo sapiens; identical to SEQ ID NO: 1530

SEQ ID NO: 3837 - DNA, 51 bp, Homo sapiens; identical to SEQ ID NO: 2358

SEQ ID NO: 3838 - DNA, 51 bp, Homo sapiens; identical to SEQ ID NO: 3225

SEQ ID NO: 3839 - DNA, 51 bp, Homo sapiens; identical to SEQ ID NO: 1666

SEQ ID NO: 3840 - DNA, 51 bp, Homo sapiens; identical to SEQ ID NO: 2766

SEQ ID NO: 3841 - DNA, 51 bp, Homo sapiens; identical to SEQ ID NO: 3265

SEQ ID NO: 3842 - DNA, 51 bp, Homo sapiens; identical to SEQ ID NO: 3224

SEQ ID NO: 3843 - DNA, 51 bp, Homo sapiens; identical to SEQ ID NO: 3185

SEQ ID NO: 3844 - DNA, 51 bp, Homo sapiens; identical to SEQ ID NO: 604

SEQ ID NO: 3845 - DNA, 51 bp, Homo sapiens; identical to SEQ ID NO: 3195

SEQ ID NO: 3846 - DNA, 51 bp, Homo sapiens; identical to SEQ ID NO: 3273

SEQ ID NO: 3847 - DNA, 51 bp, Homo sapiens; identical to SEQ ID NO: 909

SEQ ID NO: 3848 - DNA, 51 bp, Homo sapiens; identical to SEQ ID NO: 3184

SEQ ID NO: 3849 - DNA, 51 bp, Homo sapiens; identical to SEQ ID NO: 3191

SEQ ID NO: 3850 - DNA, 51 bp, Homo sapiens; identical to SEQ ID NO: 3164

SEQ ID NO: 3851 - DNA, 51 bp, Homo sapiens; identical to SEQ ID NO: 3233

SEQ ID NO: 3852 - DNA, 51 bp, Homo sapiens; identical to SEQ ID NO: 3239

SEQ ID NO: 3853 - DNA, 51 bp, Homo sapiens; identical to SEQ ID NO: 1879

SEQ ID NO: 3854 - DNA, 51 bp, Homo sapiens; identical to SEQ ID NO: 364

SEQ ID NO: 3855 - DNA, 51 bp, Homo sapiens; identical to SEQ ID NO: 2365

SEQ ID NO: 3856 - DNA, 51 bp, Homo sapiens; identical to SEQ ID NO: 1853

SEQ ID NO: 3857 - DNA, 51 bp, Homo sapiens; identical to SEQ ID NO: 1303

SEQ ID NO: 3858 - DNA, 51 bp, Homo sapiens; identical to SEQ ID NO: 3266

SEQ ID NO: 3859 - DNA, 51 bp, Homo sapiens; identical to SEQ ID NO: 328

SEQ ID NO: 3860 - DNA, 51 bp, Homo sapiens; identical to SEQ ID NO: 484

SEQ ID NO: 3861 - DNA, 51 bp, Homo sapiens; identical to SEQ ID NO: 3166

SEQ ID NO: 3862 - DNA, 51 bp, Homo sapiens; identical to SEQ ID NO: 203

SEQ ID NO: 3863 - DNA, 51 bp, Homo sapiens; identical to SEQ ID NO: 3293

SEQ ID NO: 3864 - DNA, 51 bp, Homo sapiens; identical to SEQ ID NO: 1114

SEQ ID NO: 3865 - DNA, 51 bp, Homo sapiens; identical to SEQ ID NO: 3222

SEQ ID NO: 3866 - DNA, 51 bp, Homo sapiens; identical to SEQ ID NO: 975

SEQ ID NO: 3867 - DNA, 51 bp, Homo sapiens; identical to SEQ ID NO: 3229

SEQ ID NO: 3868 - DNA, 51 bp, Homo sapiens; identical to SEQ ID NO: 3200

SEQ ID NO: 3869 - DNA, 51 bp, Homo sapiens; identical to SEQ ID NO: 1942

SEQ ID NO: 3870 - DNA, 51 bp, Homo sapiens; identical to SEQ ID NO: 483

SEQ ID NO: 3871 - DNA, 51 bp, Homo sapiens; identical to SEQ ID NO: 1604

SEQ ID NO: 3872 - DNA, 51 bp, Homo sapiens; identical to SEQ ID NO: 1692

SEQ ID NO: 3873 - DNA, 51 bp, Homo sapiens; identical to SEQ ID NO: 248

SEQ ID NO: 3874 - DNA, 51 bp, Homo sapiens; identical to SEQ ID NO: 1308

SEQ ID NO: 3875 - DNA, 51 bp, Homo sapiens; identical to SEQ ID NO: 3216

SEQ ID NO: 3876 - DNA, 51 bp, Homo sapiens; identical to SEQ ID NO: 2379

SEQ ID NO: 3877 - DNA, 51 bp, Homo sapiens; identical to SEQ ID NO: 1094

SEQ ID NO: 3878 - DNA, 51 bp, Homo sapiens; identical to SEQ ID NO: 3210

SEQ ID NO: 3879 - DNA, 51 bp, Homo sapiens; identical to SEQ ID NO: 1147

SEQ ID NO: 3880 - DNA, 51 bp, Homo sapiens; identical to SEQ ID NO: 2701

SEQ ID NO: 3881 - DNA, 51 bp, Homo sapiens; identical to SEQ ID NO: 3203

SEQ ID NO: 3882 - DNA, 51 bp, Homo sapiens; identical to SEQ ID NO: 2157

SEQ ID NO: 3883 - DNA, 51 bp, Homo sapiens; identical to SEQ ID NO: 3208

SEQ ID NO: 3884 - DNA, 51 bp, Homo sapiens; identical to SEQ ID NO: 3189

SEQ ID NO: 3885 - DNA, 51 bp, Homo sapiens; identical to SEQ ID NO: 3300

SEQ ID NO: 3886 - DNA, 51 bp, Homo sapiens; identical to SEQ ID NO: 3213

SEQ ID NO: 3887 - DNA, 51 bp, Homo sapiens; identical to SEQ ID NO: 2852

SEQ ID NO: 3888 - DNA, 51 bp, Homo sapiens; identical to SEQ ID NO: 569

SEQ ID NO: 3889 - DNA, 51 bp, Homo sapiens; identical to SEQ ID NO: 266

SEQ ID NO: 3890 - DNA, 51 bp, Homo sapiens; identical to SEQ ID NO: 2101

SEQ ID NO: 3891 - DNA, 51 bp, Homo sapiens; identical to SEQ ID NO: 865

SEQ ID NO: 3892 - DNA, 51 bp, Homo sapiens; identical to SEQ ID NO: 1690

SEQ ID NO: 3893 - DNA, 51 bp, Homo sapiens; identical to SEQ ID NO: 3169

SEQ ID NO: 3894 - DNA, 51 bp, Homo sapiens; identical to SEQ ID NO: 2388

SEQ ID NO: 3895 - DNA, 51 bp, Homo sapiens; identical to SEQ ID NO: 3260

SEQ ID NO: 3896 - DNA, 51 bp, Homo sapiens; identical to SEQ ID NO: 3227

SEQ ID NO: 3897 - DNA, 51 bp, Homo sapiens; identical to SEQ ID NO: 3308

SEQ ID NO: 3898 - DNA, 51 bp, Homo sapiens; identical to SEQ ID NO: 3327

SEQ ID NO: 3899 - DNA, 51 bp, Homo sapiens; identical to SEQ ID NO: 148

SEQ ID NO: 3900 - DNA, 51 bp, Homo sapiens; identical to SEQ ID NO: 1990

SEQ ID NO: 3901 - DNA, 51 bp, Homo sapiens; identical to SEQ ID NO: 1753

SEQ ID NO: 3902 - DNA, 51 bp, Homo sapiens; identical to SEQ ID NO: 3246

SEQ ID NO: 3903 - DNA, 51 bp, Homo sapiens; identical to SEQ ID NO: 3232

SEQ ID NO: 3904 - DNA, 51 bp, Homo sapiens; identical to SEQ ID NO: 172

SEQ ID NO: 3905 - DNA, 51 bp, Homo sapiens; identical to SEQ ID NO: 3182

SEQ ID NO: 3906 - DNA, 51 bp, Homo sapiens; identical to SEQ ID NO: 3272

SEQ ID NO: 3907 - DNA, 51 bp, Homo sapiens; identical to SEQ ID NO: 2729

SEQ ID NO: 3908 - DNA, 51 bp, Homo sapiens; identical to SEQ ID NO: 343

SEQ ID NO: 3909 - DNA, 51 bp, Homo sapiens; identical to SEQ ID NO: 3243

SEQ ID NO: 3910 - DNA, 51 bp, Homo sapiens; identical to SEQ ID NO: 1237

SEQ ID NO: 3911 - DNA, 51 bp, Homo sapiens; identical to SEQ ID NO: 424

SEQ ID NO: 3912 - DNA, 51 bp, Homo sapiens; identical to SEQ ID NO: 3215

SEQ ID NO: 3913 - DNA, 51 bp, Homo sapiens; identical to SEQ ID NO: 1822

SEQ ID NO: 3914 - DNA, 51 bp, Homo sapiens; identical to SEQ ID NO: 3248

SEQ ID NO: 3915 - DNA, 51 bp, Homo sapiens; identical to SEQ ID NO: 1987

SEQ ID NO: 3916 - DNA, 51 bp, Homo sapiens; identical to SEQ ID NO: 2771

SEQ ID NO: 3917 - DNA, 51 bp, Homo sapiens; identical to SEQ ID NO: 3287

SEQ ID NO: 3918 - DNA, 51 bp, Homo sapiens; identical to SEQ ID NO: 1333

SEQ ID NO: 3919 - DNA, 51 bp, Homo sapiens; identical to SEQ ID NO: 1271

SEQ ID NO: 3920 - DNA, 51 bp, Homo sapiens; identical to SEQ ID NO: 3347

SEQ ID NO: 3921 - DNA, 51 bp, Homo sapiens; identical to SEQ ID NO: 69

SEQ ID NO: 3922 - DNA, 51 bp, Homo sapiens; identical to SEQ ID NO: 105

SEQ ID NO: 3923 - DNA, 51 bp, Homo sapiens; identical to SEQ ID NO: 3257

SEQ ID NO: 3924 - DNA, 51 bp, Homo sapiens; identical to SEQ ID NO: 3319

SEQ ID NO: 3925 - DNA, 51 bp, Homo sapiens; identical to SEQ ID NO: 1895

SEQ ID NO: 3926 - DNA, 51 bp, Homo sapiens; identical to SEQ ID NO: 3188

SEQ ID NO: 3927 - DNA, 51 bp, Homo sapiens; identical to SEQ ID NO: 3309

SEQ ID NO: 3928 - DNA, 51 bp, Homo sapiens; identical to SEQ ID NO: 3362

SEQ ID NO: 3929 - DNA, 51 bp, Homo sapiens; identical to SEQ ID NO: 3223

SEQ ID NO: 3930 - DNA, 51 bp, Homo sapiens; identical to SEQ ID NO: 3311

SEQ ID NO: 3931 - DNA, 51 bp, Homo sapiens; identical to SEQ ID NO: 3280

SEQ ID NO: 3932 - DNA, 51 bp, Homo sapiens; identical to SEQ ID NO: 83

SEQ ID NO: 3933 - DNA, 51 bp, Homo sapiens; identical to SEQ ID NO: 3296

SEQ ID NO: 3934 - DNA, 51 bp, Homo sapiens; identical to SEQ ID NO: 3356

SEQ ID NO: 3935 - DNA, 51 bp, Homo sapiens; identical to SEQ ID NO: 3274

SEQ ID NO: 3936 - DNA, 51 bp, Homo sapiens; identical to SEQ ID NO: 3333

SEQ ID NO: 3937 - DNA, 51 bp, Homo sapiens; identical to SEQ ID NO: 3255

SEQ ID NO: 3938 - DNA, 51 bp, Homo sapiens; identical to SEQ ID NO: 3332

SEQ ID NO: 3939 - DNA, 51 bp, Homo sapiens; identical to SEQ ID NO: 2594

SEQ ID NO: 3940 - DNA, 51 bp, Homo sapiens; identical to SEQ ID NO: 3282

SEQ ID NO: 3941 - DNA, 51 bp, Homo sapiens; identical to SEQ ID NO: 3262

SEQ ID NO: 3942 - DNA, 51 bp, Homo sapiens; identical to SEQ ID NO: 1248

SEQ ID NO: 3943 - DNA, 51 bp, Homo sapiens; identical to SEQ ID NO: 1338

SEQ ID NO: 3944 - DNA, 51 bp, Homo sapiens; identical to SEQ ID NO: 3320

SEQ ID NO: 3945 - DNA, 51 bp, Homo sapiens; identical to SEQ ID NO: 2188

SEQ ID NO: 3946 - DNA, 51 bp, Homo sapiens; identical to SEQ ID NO: 1323

SEQ ID NO: 3947 - DNA, 51 bp, Homo sapiens; identical to SEQ ID NO: 55

SEQ ID NO: 3948 - DNA, 51 bp, Homo sapiens; identical to SEQ ID NO: 496

SEQ ID NO: 3949 - DNA, 51 bp, Homo sapiens; identical to SEQ ID NO: 2416

SEQ ID NO: 3950 - DNA, 51 bp, Homo sapiens; identical to SEQ ID NO: 2540

SEQ ID NO: 3951 - DNA, 51 bp, Homo sapiens; identical to SEQ ID NO: 1642

SEQ ID NO: 3952 - DNA, 51 bp, Homo sapiens; identical to SEQ ID NO: 2628

SEQ ID NO: 3953 - DNA, 51 bp, Homo sapiens; identical to SEQ ID NO: 3390

SEQ ID NO: 3954 - DNA, 51 bp, Homo sapiens; identical to SEQ ID NO: 1230

SEQ ID NO: 3955 - DNA, 51 bp, Homo sapiens; identical to SEQ ID NO: 2461

SEQ ID NO: 3956 - DNA, 51 bp, Homo sapiens; identical to SEQ ID NO: 2756

SEQ ID NO: 3957 - DNA, 51 bp, Homo sapiens; identical to SEQ ID NO: 14

SEQ ID NO: 3958 - DNA, 51 bp, Homo sapiens; identical to SEQ ID NO: 90

SEQ ID NO: 3959 - DNA, 51 bp, Homo sapiens; identical to SEQ ID NO: 3214

SEQ ID NO: 3960 - DNA, 51 bp, Homo sapiens
agtgccagctctgcctgcatcgagcmctatgtggcgcatctagaccaggat

SEQ ID NO: 3961 - DNA, 51 bp, Homo sapiens; identical to SEQ ID NO: 2872

SEQ ID NO: 3962 - DNA, 51 bp, Homo sapiens; identical to SEQ ID NO: 18

SEQ ID NO: 3963 - DNA, 51 bp, Homo sapiens; identical to SEQ ID NO: 2749

SEQ ID NO: 3964 - DNA, 51 bp, Homo sapiens; identical to SEQ ID NO: 1734

SEQ ID NO: 3965 - DNA, 51 bp, Homo sapiens; identical to SEQ ID NO: 2599

SEQ ID NO: 3966 - DNA, 51 bp, Homo sapiens; identical to SEQ ID NO: 3335

SEQ ID NO: 3967 - DNA, 51 bp, Homo sapiens; identical to SEQ ID NO: 38

SEQ ID NO: 3968 - DNA, 51 bp, Homo sapiens; identical to SEQ ID NO: 2735

SEQ ID NO: 3969 - DNA, 51 bp, Homo sapiens; identical to SEQ ID NO: 3298

SEQ ID NO: 3970 - DNA, 51 bp, Homo sapiens; identical to SEQ ID NO: 3468

SEQ ID NO: 3971 - DNA, 51 bp, Homo sapiens; identical to SEQ ID NO: 391

SEQ ID NO: 3972 - DNA, 51 bp, Homo sapiens; identical to SEQ ID NO: 1193

SEQ ID NO: 3973 - DNA, 51 bp, Homo sapiens; identical to SEQ ID NO: 1629

SEQ ID NO: 3974 - DNA, 51 bp, Homo sapiens; identical to SEQ ID NO: 2048

SEQ ID NO: 3975 - DNA, 51 bp, Homo sapiens; identical to SEQ ID NO: 3337

SEQ ID NO: 3976 - DNA, 51 bp, Homo sapiens; identical to SEQ ID NO: 2934

SEQ ID NO: 3977 - DNA, 51 bp, Homo sapiens; identical to SEQ ID NO: 905

SEQ ID NO: 3978 - DNA, 51 bp, Homo sapiens; identical to SEQ ID NO: 1765

SEQ ID NO: 3979 - DNA, 51 bp, Homo sapiens; identical to SEQ ID NO: 3429

SEQ ID NO: 3980 - DNA, 51 bp, Homo sapiens; identical to SEQ ID NO: 730

SEQ ID NO: 3981 - DNA, 51 bp, Homo sapiens; identical to SEQ ID NO: 861

SEQ ID NO: 3982 - DNA, 51 bp, Homo sapiens; identical to SEQ ID NO: 2050

SEQ ID NO: 3983 - DNA, 51 bp, Homo sapiens; identical to SEQ ID NO: 1835

SEQ ID NO: 3984 - DNA, 51 bp, Homo sapiens; identical to SEQ ID NO: 3402

SEQ ID NO: 3985 - DNA, 51 bp, Homo sapiens; identical to SEQ ID NO: 3331

SEQ ID NO: 3986 - DNA, 51 bp, Homo sapiens; identical to SEQ ID NO: 3353

SEQ ID NO: 3987 - DNA, 51 bp, Homo sapiens; identical to SEQ ID NO: 366

SEQ ID NO: 3988 - DNA, 51 bp, Homo sapiens; identical to SEQ ID NO: 3284

SEQ ID NO: 3989 - DNA, 51 bp, Homo sapiens
aaggatgggtagagcgaggacctatsggatgtgtaggcaaagctggtggcc

SEQ ID NO: 3990 - DNA, 51 bp, Homo sapiens; identical to SEQ ID NO: 3358

SEQ ID NO: 3991 - DNA, 51 bp, Homo sapiens; identical to SEQ ID NO: 714

SEQ ID NO: 3992 - DNA, 51 bp, Homo sapiens; identical to SEQ ID NO: 3316

SEQ ID NO: 3993 - DNA, 51 bp, Homo sapiens; identical to SEQ ID NO: 3322

SEQ ID NO: 3994 - DNA, 51 bp, Homo sapiens; identical to SEQ ID NO: 887

SEQ ID NO: 3995 - DNA, 51 bp, Homo sapiens; identical to SEQ ID NO: 3253

SEQ ID NO: 3996 - DNA, 51 bp, Homo sapiens; identical to SEQ ID NO: 1752

SEQ ID NO: 3997 - DNA, 51 bp, Homo sapiens; identical to SEQ ID NO: 1522

SEQ ID NO: 3998 - DNA, 51 bp, Homo sapiens; identical to SEQ ID NO: 3431

SEQ ID NO: 3999 - DNA, 51 bp, Homo sapiens; identical to SEQ ID NO: 1930

SEQ ID NO: 4000 - DNA, 51 bp, Homo sapiens; identical to SEQ ID NO: 3324

SEQ ID NO: 4001 - DNA, 51 bp, Homo sapiens; identical to SEQ ID NO: 1290

SEQ ID NO: 4002 - DNA, 51 bp, Homo sapiens; identical to SEQ ID NO: 1362

SEQ ID NO: 4003 - DNA, 51 bp, Homo sapiens; identical to SEQ ID NO: 3305

SEQ ID NO: 4004 - DNA, 51 bp, Homo sapiens; identical to SEQ ID NO: 122

SEQ ID NO: 4005 - DNA, 51 bp, Homo sapiens; identical to SEQ ID NO: 250

SEQ ID NO: 4006 - DNA, 51 bp, Homo sapiens; identical to SEQ ID NO: 401

SEQ ID NO: 4007 - DNA, 51 bp, Homo sapiens; identical to SEQ ID NO: 1137

SEQ ID NO: 4008 - DNA, 51 bp, Homo sapiens; identical to SEQ ID NO: 3269

SEQ ID NO: 4009 - DNA, 51 bp, Homo sapiens; identical to SEQ ID NO: 166

SEQ ID NO: 4010 - DNA, 51 bp, Homo sapiens; identical to SEQ ID NO: 2992

SEQ ID NO: 4011 - DNA, 51 bp, Homo sapiens; identical to SEQ ID NO: 2359

SEQ ID NO: 4012 - DNA, 51 bp, Homo sapiens; identical to SEQ ID NO: 3325

SEQ ID NO: 4013 - DNA, 51 bp, Homo sapiens; identical to SEQ ID NO: 1298

SEQ ID NO: 4014 - DNA, 51 bp, Homo sapiens; identical to SEQ ID NO: 3334

SEQ ID NO: 4015 - DNA, 51 bp, Homo sapiens; identical to SEQ ID NO: 3360

SEQ ID NO: 4016 - DNA, 51 bp, Homo sapiens; identical to SEQ ID NO: 951

SEQ ID NO: 4017 - DNA, 51 bp, Homo sapiens; identical to SEQ ID NO: 2395

SEQ ID NO: 4018 - DNA, 51 bp, Homo sapiens; identical to SEQ ID NO: 1625

SEQ ID NO: 4019 - DNA, 51 bp, Homo sapiens; identical to SEQ ID NO: 1615

SEQ ID NO: 4020 - DNA, 51 bp, Homo sapiens; identical to SEQ ID NO: 1694

SEQ ID NO: 4021 - DNA, 51 bp, Homo sapiens; identical to SEQ ID NO: 1738

SEQ ID NO: 4022 - DNA, 51 bp, Homo sapiens; identical to SEQ ID NO: 308

SEQ ID NO: 4023 - DNA, 51 bp, Homo sapiens; identical to SEQ ID NO: 3463

SEQ ID NO: 4024 - DNA, 51 bp, Homo sapiens; identical to SEQ ID NO: 603

SEQ ID NO: 4025 - DNA, 51 bp, Homo sapiens; identical to SEQ ID NO: 3352

SEQ ID NO: 4026 - DNA, 51 bp, Homo sapiens; identical to SEQ ID NO: 2612

SEQ ID NO: 4027 - DNA, 51 bp, Homo sapiens; identical to SEQ ID NO: 68

SEQ ID NO: 4028 - DNA, 51 bp, Homo sapiens; identical to SEQ ID NO: 1673

SEQ ID NO: 4029 - DNA, 51 bp, Homo sapiens; identical to SEQ ID NO: 2727

SEQ ID NO: 4030 - DNA, 51 bp, Homo sapiens; identical to SEQ ID NO: 123

SEQ ID NO: 4031 - DNA, 51 bp, Homo sapiens; identical to SEQ ID NO: 3412

SEQ ID NO: 4032 - DNA, 51 bp, Homo sapiens; identical to SEQ ID NO: 160

SEQ ID NO: 4033 - DNA, 51 bp, Homo sapiens; identical to SEQ ID NO: 3432

SEQ ID NO: 4034 - DNA, 51 bp, Homo sapiens; identical to SEQ ID NO: 1645

SEQ ID NO: 4035 - DNA, 51 bp, Homo sapiens; identical to SEQ ID NO: 1972

SEQ ID NO: 4036 - DNA, 51 bp, Homo sapiens; identical to SEQ ID NO: 3355

SEQ ID NO: 4037 - DNA, 51 bp, Homo sapiens; identical to SEQ ID NO: 3371

SEQ ID NO: 4038 - DNA, 51 bp, Homo sapiens; identical to SEQ ID NO: 3299

SEQ ID NO: 4039 - DNA, 51 bp, Homo sapiens; identical to SEQ ID NO: 2811

SEQ ID NO: 4040 - DNA, 51 bp, Homo sapiens; identical to SEQ ID NO: 3306

SEQ ID NO: 4041 - DNA, 51 bp, Homo sapiens; identical to SEQ ID NO: 378

SEQ ID NO: 4042 - DNA, 51 bp, Homo sapiens; identical to SEQ ID NO: 1488

SEQ ID NO: 4043 - DNA, 51 bp, Homo sapiens; identical to SEQ ID NO: 3357

SEQ ID NO: 4044 - DNA, 51 bp, Homo sapiens; identical to SEQ ID NO: 3430

SEQ ID NO: 4045 - DNA, 51 bp, Homo sapiens; identical to SEQ ID NO: 920

SEQ ID NO: 4046 - DNA, 51 bp, Homo sapiens; identical to SEQ ID NO: 3388

SEQ ID NO: 4047 - DNA, 51 bp, Homo sapiens; identical to SEQ ID NO: 3732

SEQ ID NO: 4048 - DNA, 51 bp, Homo sapiens; identical to SEQ ID NO: 152

SEQ ID NO: 4049 - DNA, 51 bp, Homo sapiens; identical to SEQ ID NO: 2171

SEQ ID NO: 4050 - DNA, 51 bp, Homo sapiens; identical to SEQ ID NO: 517

SEQ ID NO: 4051 - DNA, 51 bp, Homo sapiens; identical to SEQ ID NO: 589

SEQ ID NO: 4052 - DNA, 51 bp, Homo sapiens; identical to SEQ ID NO: 1998

SEQ ID NO: 4053 - DNA, 51 bp, Homo sapiens; identical to SEQ ID NO: 3369

SEQ ID NO: 4054 - DNA, 51 bp, Homo sapiens; identical to SEQ ID NO: 2311

SEQ ID NO: 4055 - DNA, 51 bp, Homo sapiens; identical to SEQ ID NO: 1136

SEQ ID NO: 4056 - DNA, 51 bp, Homo sapiens; identical to SEQ ID NO: 3425

SEQ ID NO: 4057 - DNA, 51 bp, Homo sapiens; identical to SEQ ID NO: 3345

SEQ ID NO: 4058 - DNA, 51 bp, Homo sapiens
ttaacagttatgcgtgagtataggcrtttgggagattccatgaaaaaattt

SEQ ID NO: 4059 - DNA, 51 bp, Homo sapiens; identical to SEQ ID NO: 3471

SEQ ID NO: 4060 - DNA, 51 bp, Homo sapiens; identical to SEQ ID NO: 3382

SEQ ID NO: 4061 - DNA, 51 bp, Homo sapiens; identical to SEQ ID NO: 1007

SEQ ID NO: 4062 - DNA, 51 bp, Homo sapiens; identical to SEQ ID NO: 3400

SEQ ID NO: 4063 - DNA, 51 bp, Homo sapiens; identical to SEQ ID NO: 3372

SEQ ID NO: 4064 - DNA, 51 bp, Homo sapiens
aaccttgaaggatcaatcacagtagrggtgggaagaagaggagcctgaaga

SEQ ID NO: 4065 - DNA, 51 bp, Homo sapiens; identical to SEQ ID NO: 618

SEQ ID NO: 4066 - DNA, 51 bp, Homo sapiens; identical to SEQ ID NO: 235

SEQ ID NO: 4067 - DNA, 51 bp, Homo sapiens; identical to SEQ ID NO: 2856

SEQ ID NO: 4068 - DNA, 51 bp, Homo sapiens; identical to SEQ ID NO: 2481

SEQ ID NO: 4069 - DNA, 51 bp, Homo sapiens; identical to SEQ ID NO: 3301

SEQ ID NO: 4070 - DNA, 51 bp, Homo sapiens; identical to SEQ ID NO: 2961

SEQ ID NO: 4071 - DNA, 51 bp, Homo sapiens
gaggtggagctgggtccagccacgtyttaggtggcttgcaacaacatggtc

SEQ ID NO: 4072 - DNA, 51 bp, Homo sapiens; identical to SEQ ID NO: 1603

SEQ ID NO: 4073 - DNA, 51 bp, Homo sapiens; identical to SEQ ID NO: 896

SEQ ID NO: 4074 - DNA, 51 bp, Homo sapiens; identical to SEQ ID NO: 637

SEQ ID NO: 4075 - DNA, 51 bp, Homo sapiens; identical to SEQ ID NO: 1263

SEQ ID NO: 4076 - DNA, 51 bp, Homo sapiens; identical to SEQ ID NO: 858

SEQ ID NO: 4077 - DNA, 51 bp, Homo sapiens; identical to SEQ ID NO: 1279

SEQ ID NO: 4078 - DNA, 51 bp, Homo sapiens; identical to SEQ ID NO: 1016

SEQ ID NO: 4079 - DNA, 51 bp, Homo sapiens; identical to SEQ ID NO: 2429

SEQ ID NO: 4080 - DNA, 51 bp, Homo sapiens; identical to SEQ ID NO: 1347

SEQ ID NO: 4081 - DNA, 51 bp, Homo sapiens
ctacagaagaatccagaagaaccgaytctgtgaatgatctttaacattttg

SEQ ID NO: 4082 - DNA, 51 bp, Homo sapiens; identical to SEQ ID NO: 2517

SEQ ID NO: 4083 - DNA, 51 bp, Homo sapiens; identical to SEQ ID NO: 3342

SEQ ID NO: 4084 - DNA, 51 bp, Homo sapiens; identical to SEQ ID NO: 1727

SEQ ID NO: 4085 - DNA, 51 bp, Homo sapiens; identical to SEQ ID NO: 3374

SEQ ID NO: 4086 - DNA, 51 bp, Homo sapiens; identical to SEQ ID NO: 3407

SEQ ID NO: 4087 - DNA, 51 bp, Homo sapiens; identical to SEQ ID NO: 3363

SEQ ID NO: 4088 - DNA, 51 bp, Homo sapiens; identical to SEQ ID NO: 1965

SEQ ID NO: 4089 - DNA, 51 bp, Homo sapiens; identical to SEQ ID NO: 2820

SEQ ID NO: 4090 - DNA, 51 bp, Homo sapiens; identical to SEQ ID NO: 3488

SEQ ID NO: 4091 - DNA, 51 bp, Homo sapiens; identical to SEQ ID NO: 3338

SEQ ID NO: 4092 - DNA, 51 bp, Homo sapiens; identical to SEQ ID NO: 3442

SEQ ID NO: 4093 - DNA, 51 bp, Homo sapiens; identical to SEQ ID NO: 2655

SEQ ID NO: 4094 - DNA, 51 bp, Homo sapiens; identical to SEQ ID NO: 3450

SEQ ID NO: 4095 - DNA, 51 bp, Homo sapiens; identical to SEQ ID NO: 1774

SEQ ID NO: 4096 - DNA, 51 bp, Homo sapiens; identical to SEQ ID NO: 3384

SEQ ID NO: 4097 - DNA, 51 bp, Homo sapiens; identical to SEQ ID NO: 3414

SEQ ID NO: 4098 - DNA, 51 bp, Homo sapiens
actggttgccacatatgaaactcggkgaactccctcacaatgaagtttccg

SEQ ID NO: 4099 - DNA, 51 bp, Homo sapiens; identical to SEQ ID NO: 3416

SEQ ID NO: 4100 - DNA, 51 bp, Homo sapiens
attaccaactcttctgtcaccttttrtttttctcactcctggactccagac

SEQ ID NO: 4101 - DNA, 51 bp, Homo sapiens; identical to SEQ ID NO: 3486

SEQ ID NO: 4102 - DNA, 51 bp, Homo sapiens; identical to SEQ ID NO: 134

SEQ ID NO: 4103 - DNA, 51 bp, Homo sapiens; identical to SEQ ID NO: 3368

SEQ ID NO: 4104 - DNA, 51 bp, Homo sapiens; identical to SEQ ID NO: 1945

SEQ ID NO: 4105 - DNA, 51 bp, Homo sapiens; identical to SEQ ID NO: 2781

SEQ ID NO: 4106 - DNA, 51 bp, Homo sapiens; identical to SEQ ID NO: 1354

SEQ ID NO: 4107 - DNA, 51 bp, Homo sapiens; identical to SEQ ID NO: 31

SEQ ID NO: 4108 - DNA, 51 bp, Homo sapiens; identical to SEQ ID NO: 782

SEQ ID NO: 4109 - DNA, 51 bp, Homo sapiens; identical to SEQ ID NO: 2117

SEQ ID NO: 4110 - DNA, 51 bp, Homo sapiens; identical to SEQ ID NO: 1033

SEQ ID NO: 4111 - DNA, 51 bp, Homo sapiens; identical to SEQ ID NO: 3375

SEQ ID NO: 4112 - DNA, 51 bp, Homo sapiens; identical to SEQ ID NO: 204

SEQ ID NO: 4113 - DNA, 51 bp, Homo sapiens; identical to SEQ ID NO: 1212

SEQ ID NO: 4114 - DNA, 51 bp, Homo sapiens; identical to SEQ ID NO: 2799

SEQ ID NO: 4115 - DNA, 51 bp, Homo sapiens
atgccagacaggtgctgcttcctacrgggctcaaagcaccttgaaaacatc

SEQ ID NO: 4116 - DNA, 51 bp, Homo sapiens; identical to SEQ ID NO: 1196

SEQ ID NO: 4117 - DNA, 51 bp, Homo sapiens
attctgcatcattggcatttcatcaytgacacttttttctgaaatgagaag

SEQ ID NO: 4118 - DNA, 51 bp, Homo sapiens
catggaacctgagctgcctaactccwgagttcacgtactgagccaccacgt

SEQ ID NO: 4119 - DNA, 51 bp, Homo sapiens; identical to SEQ ID NO: 115

SEQ ID NO: 4120 - DNA, 51 bp, Homo sapiens; identical to SEQ ID NO: 3435

SEQ ID NO: 4121 - DNA, 51 bp, Homo sapiens
tggcccagttgtggcatggactgggygagctctaaggactgacagttcagt

SEQ ID NO: 4122 - DNA, 51 bp, Homo sapiens
acaaatgagctggtgcttgtttgtgwctatagcagagttcttttgatgctc

SEQ ID NO: 4123 - DNA, 51 bp, Homo sapiens; identical to SEQ ID NO: 3408

SEQ ID NO: 4124 - DNA, 51 bp, Homo sapiens; identical to SEQ ID NO: 1924

SEQ ID NO: 4125 - DNA, 51 bp, Homo sapiens; identical to SEQ ID NO: 999

SEQ ID NO: 4126 - DNA, 51 bp, Homo sapiens; identical to SEQ ID NO: 1234

SEQ ID NO: 4127 - DNA, 51 bp, Homo sapiens; identical to SEQ ID NO: 2170

SEQ ID NO: 4128 - DNA, 51 bp, Homo sapiens; identical to SEQ ID NO: 1080

SEQ ID NO: 4129 - DNA, 51 bp, Homo sapiens; identical to SEQ ID NO: 3447

SEQ ID NO: 4130 - DNA, 51 bp, Homo sapiens
cgtagtaacttcaggtctccagttgygttatcattcagaacataatcatca

SEQ ID NO: 4131 - DNA, 51 bp, Homo sapiens; identical to SEQ ID NO: 895

SEQ ID NO: 4132 - DNA, 51 bp, Homo sapiens
ttcagcagaggtacttgcagggcccraggtcatcttgtgttggccctggat

SEQ ID NO: 4133 - DNA, 51 bp, Homo sapiens; identical to SEQ ID NO: 3288

SEQ ID NO: 4134 - DNA, 51 bp, Homo sapiens; identical to SEQ ID NO: 1195

SEQ ID NO: 4135 - DNA, 51 bp, Homo sapiens; identical to SEQ ID NO: 1162

SEQ ID NO: 4136 - DNA, 51 bp, Homo sapiens
gtgaaatagagcttaagggttaataygatgatgagcaaacatctggaattc

SEQ ID NO: 4137 - DNA, 51 bp, Homo sapiens
tgaatgattccagccaagatcagcaragtcatctaactgacacctacctga

SEQ ID NO: 4138 - DNA, 51 bp, Homo sapiens; identical to SEQ ID NO: 2287

SEQ ID NO: 4139 - DNA, 51 bp, Homo sapiens; identical to SEQ ID NO: 3359

SEQ ID NO: 4140 - DNA, 51 bp, Homo sapiens
gccccagtaccagagccaccgggtgrgggccagcacagtgccggccagcct

SEQ ID NO: 4141 - DNA, 51 bp, Homo sapiens; identical to SEQ ID NO: 3708

SEQ ID NO: 4142 - DNA, 51 bp, Homo sapiens; identical to SEQ ID NO: 215

SEQ ID NO: 4143 - DNA, 51 bp, Homo sapiens; identical to SEQ ID NO: 1293

SEQ ID NO: 4144 - DNA, 51 bp, Homo sapiens
tgttcatacgtacttctctgtgcacrcaaaggagggcttgctagggaggcc

SEQ ID NO: 4145 - DNA, 51 bp, Homo sapiens; identical to SEQ ID NO: 2255

SEQ ID NO: 4146 - DNA, 51 bp, Homo sapiens
ataatgtcactagatagattcattasattagaaacatatccatttaattaa

SEQ ID NO: 4147 - DNA, 51 bp, Homo sapiens; identical to SEQ ID NO: 1053

SEQ ID NO: 4148 - DNA, 51 bp, Homo sapiens
atctgttgtgaaattaacactgagamgctattacagcatgtgctaatcata

SEQ ID NO: 4149 - DNA, 51 bp, Homo sapiens; identical to SEQ ID NO: 665

SEQ ID NO: 4150 - DNA, 51 bp, Homo sapiens; identical to SEQ ID NO: 1503

SEQ ID NO: 4151 - DNA, 51 bp, Homo sapiens
aatatatgagcccaagttatgagcaygtgatggctcaagctgacattaaaa

SEQ ID NO: 4152 - DNA, 51 bp, Homo sapiens
gtggccatccctgggaatgcaagcakggatgcagtctgcacgtccacgtcc

SEQ ID NO: 4153 - DNA, 51 bp, Homo sapiens; identical to SEQ ID NO: 287

SEQ ID NO: 4154 - DNA, 51 bp, Homo sapiens
acacagatgccatggttggaacacaytgggtctaggcagtcctctgaaggc

SEQ ID NO: 4155 - DNA, 51 bp, Homo sapiens
tgtcaccggatggcctgtttttcagwaggctacccccatacaaccgagtgg

SEQ ID NO: 4156 - DNA, 51 bp, Homo sapiens; identical to SEQ ID NO: 53

SEQ ID NO: 4157 - DNA, 51 bp, Homo sapiens; identical to SEQ ID NO: 97

SEQ ID NO: 4158 - DNA, 51 bp, Homo sapiens
ttccctaggtaagtatcatcctatgrgtccaaccttaaaaatgtcacaggg

SEQ ID NO: 4159 - DNA, 51 bp, Homo sapiens
gcacactctagcgtggctatttgtgyggaactccccattggtctattaatt

SEQ ID NO: 4160 - DNA, 51 bp, Homo sapiens
tatcaatgagaatgaaacccaaagaraactgatgcatcacccagtgagtga

SEQ ID NO: 4161 - DNA, 51 bp, Homo sapiens
tgtcaactgaagaacatggatctgcwccattcactgcacagtcaagctggg

SEQ ID NO: 4162 - DNA, 51 bp, Homo sapiens
taccatatggctgaatcgatgccctratttcaaattgttaatttggtactg

SEQ ID NO: 4163 - DNA, 51 bp, Homo sapiens
gcggtggtgctgttgtcggccagtgyttttcccaactaggtgagaagcagc

SEQ ID NO: 4164 - DNA, 51 bp, Homo sapiens; identical to SEQ ID NO: 3164

SEQ ID NO: 4165 - DNA, 51 bp, Homo sapiens
tggtgtgtcatatacaaggtaaaaasctacttatagaacaacatctttcca

SEQ ID NO: 4166 - DNA, 51 bp, Homo sapiens; identical to SEQ ID NO: 1590

SEQ ID NO: 4167 - DNA, 51 bp, Homo sapiens
gtcaggcaatatcaaaaagtgtatgyctcaatataatcaaatatgttcttt

SEQ ID NO: 4168 - DNA, 51 bp, Homo sapiens; identical to SEQ ID NO: 951

SEQ ID NO: 4169 - DNA, 51 bp, Homo sapiens; identical to SEQ ID NO: 3443

SEQ ID NO: 4170 - DNA, 51 bp, Homo sapiens; identical to SEQ ID NO: 1162

SEQ ID NO: 4171 - DNA, 51 bp, Homo sapiens; identical to SEQ ID NO: 344

SEQ ID NO: 4172 - DNA, 51 bp, Homo sapiens; identical to SEQ ID NO: 575

SEQ ID NO: 4173 - DNA, 51 bp, Homo sapiens; identical to SEQ ID NO: 697

SEQ ID NO: 4174 - DNA, 51 bp, Homo sapiens
aagctcagctggggcttatcatcggrtagcagatgtgtgaattaagagggg

SEQ ID NO: 4175 - DNA, 51 bp, Homo sapiens; identical to SEQ ID NO: 3500

SEQ ID NO: 4176 - DNA, 51 bp, Homo sapiens
gatcggtgaaaaattattaaaattgmtccatttcacgagagtgtttaagtg

SEQ ID NO: 4177 - DNA, 51 bp, Homo sapiens; identical to SEQ ID NO: 56

SEQ ID NO: 4178 - DNA, 51 bp, Homo sapiens; identical to SEQ ID NO: 517

SEQ ID NO: 4179 - DNA, 51 bp, Homo sapiens
cttctttggaaaaataaatcacatcrattccaggtaggtaagaaaaaaaag

SEQ ID NO: 4180 - DNA, 51 bp, Homo sapiens
gctcaacacacagtaacaagaagtgraaaataaatgatctctctcaagtat

SEQ ID NO: 4181 - DNA, 51 bp, Homo sapiens; identical to SEQ ID NO: 924

SEQ ID NO: 4182 - DNA, 51 bp, Homo sapiens; identical to SEQ ID NO: 1688

SEQ ID NO: 4183 - DNA, 51 bp, Homo sapiens; identical to SEQ ID NO: 2082

SEQ ID NO: 4184 - DNA, 51 bp, Homo sapiens
actgcactggtgaaggtggacacttyctcctggacccgtggcttttttgcg

SEQ ID NO: 4185 - DNA, 51 bp, Homo sapiens
gtgcccctaggtgactaattttcctyaaacagttttcacacatcatcttct

SEQ ID NO: 4186 - DNA, 51 bp, Homo sapiens; identical to SEQ ID NO: 3342

SEQ ID NO: 4187 - DNA, 51 bp, Homo sapiens; identical to SEQ ID NO: 2135

SEQ ID NO: 4188 - DNA, 51 bp, Homo sapiens
cctgcctgtgccactgcctgtgaggyggtgaagtgaaaaggtggacttgtc

SEQ ID NO: 4189 - DNA, 51 bp, Homo sapiens; identical to SEQ ID NO: 3592

SEQ ID NO: 4190 - DNA, 51 bp, Homo sapiens; identical to SEQ ID NO: 3099

SEQ ID NO: 4191 - DNA, 51 bp, Homo sapiens; identical to SEQ ID NO: 3531

SEQ ID NO: 4192 - DNA, 51 bp, Homo sapiens
ctgtgtgcggacgctctgctgcgccwgcagacaagaggacatgggtggaca

SEQ ID NO: 4193 - DNA, 51 bp, Homo sapiens; identical to SEQ ID NO: 2766

SEQ ID NO: 4194 - DNA, 51 bp, Homo sapiens
gggaggaggcagacaaatacctaaayagataggagcagagccccagtgaaa

SEQ ID NO: 4195 - DNA, 51 bp, Homo sapiens
aggagggaatatgtcttggcctgacygtcttggatttatgttcactccctg

SEQ ID NO: 4196 - DNA, 51 bp, Homo sapiens
taaagaattataaagcatttcaactrtgtacacttaacaggcattctgtag

SEQ ID NO: 4197 - DNA, 51 bp, Homo sapiens
tttttctagcaatttgaggaaagtcraggccggaccagtagcaaaacagcc

SEQ ID NO: 4198 - DNA, 51 bp, Homo sapiens
ttgccctctataatcaggaataagaygaggatgtctgctcttgccatttct

SEQ ID NO: 4199 - DNA, 51 bp, Homo sapiens; identical to SEQ ID NO: 147

SEQ ID NO: 4200 - DNA, 51 bp, Homo sapiens; identical to SEQ ID NO: 2916

SEQ ID NO: 4201 - DNA, 51 bp, Homo sapiens; identical to SEQ ID NO: 3567

SEQ ID NO: 4202 - DNA, 51 bp, Homo sapiens
gtttttcagccaccgcatggttggcrttgggttccccccggctgggcagcg

SEQ ID NO: 4203 - DNA, 51 bp, Homo sapiens
acacaaacagcctcatgttcctccasatttttgatggggaccacgtggcag

SEQ ID NO: 4204 - DNA, 51 bp, Homo sapiens; identical to SEQ ID NO: 522

SEQ ID NO: 4205 - DNA, 51 bp, Homo sapiens
gcaatcatgtagagaaacctgttctycccaggaaaggagggtgagcaaatg

SEQ ID NO: 4206 - DNA, 51 bp, Homo sapiens; identical to SEQ ID NO: 2792

SEQ ID NO: 4207 - DNA, 51 bp, Homo sapiens; identical to SEQ ID NO: 2361

SEQ ID NO: 4208 - DNA, 51 bp, Homo sapiens
cttacctgcatcaatggcacacgggyaatggtatcggaaggagcagccttt

SEQ ID NO: 4209 - DNA, 29 bp, Homo sapiens
cttctgtatgaaatkctcctccattcgga

SEQ ID NO: 4210 - DNA, 29 bp, Homo sapiens
tgttactatgaaaarcaccaaataaaccc

SEQ ID NO: 4211 - DNA, 29 bp, Homo sapiens
ataaaatcactcagkgcaaatgaacagac

SEQ ID NO: 4212 - DNA, 29 bp, Homo sapiens
cagatgctaagagayggcagagttgatct

SEQ ID NO: 4213 - DNA, 29 bp, Homo sapiens
ggttgctgaacaccrggttaggctctcaa

SEQ ID NO: 4214 - DNA, 29 bp, Homo sapiens
tctgaataagaagtsaggctggtgagcat

SEQ ID NO: 4215 - DNA, 29 bp, Homo sapiens
cagagcgagtacttygttccaacatggac

SEQ ID NO: 4216 - DNA, 29 bp, Homo sapiens
ttattaagtttcagkgaacaatgtgcaat

SEQ ID NO: 4217 - DNA, 29 bp, Homo sapiens
tctggtcctctggaygctgatcatggaaa

SEQ ID NO: 4218 - DNA, 29 bp, Homo sapiens
tcaagttctttggtragaaggtcctagct

SEQ ID NO: 4219 - DNA, 29 bp, Homo sapiens
ggtacacactaggcrctccatggatgcac

SEQ ID NO: 4220 - DNA, 29 bp, Homo sapiens
tgactaccgtccagscctcctattctaag

SEQ ID NO: 4221 - DNA, 29 bp, Homo sapiens
gcagctccgagtccrtccagagcttcctg

SEQ ID NO: 4222 - DNA, 29 bp, Homo sapiens
tgagattatcactcragatgtgagtacaa

SEQ ID NO: 4223 - DNA, 29 bp, Homo sapiens
tctctcaaaaaaatrtatagacaataaca

SEQ ID NO: 4224 - DNA, 29 bp, Homo sapiens
tcattccagataatmcttcctttggcaga

SEQ ID NO: 4225 - DNA, 29 bp, Homo sapiens
gttatgattacgctrtggggttgtttatc

SEQ ID NO: 4226 - DNA, 29 bp, Homo sapiens
ccgaatgatggctgrctaggactttcacc

SEQ ID NO: 4227 - DNA, 29 bp, Homo sapiens
cattatgaagtggayttgtgtgtgtgtgc

SEQ ID NO: 4228 - DNA, 29 bp, Homo sapiens
cagtcgcaaatttgrtgctactttgtaga

SEQ ID NO: 4229 - DNA, 29 bp, Homo sapiens
ataaaatcactcagkgcaaatgaacagac

SEQ ID NO: 4230 - DNA, 29 bp, Homo sapiens
ttgaggtccaggagstgccgcccacccgg

SEQ ID NO: 4231 - DNA, 29 bp, Homo sapiens
ggttaaatgggctcrcctggactgttgag

SEQ ID NO: 4232 - DNA, 29 bp, Homo sapiens
cagatgctaagagayggcagagttgatct

SEQ ID NO: 4233 - DNA, 29 bp, Homo sapiens
ggttgctgaacaccrggttaggctctcaa

SEQ ID NO: 4234 - DNA, 29 bp, Homo sapiens
tctgaataagaagtsaggctggtgagcat

SEQ ID NO: 4235 - DNA, 29 bp, Homo sapiens
gaatcaaggcatccmttggcatcacaggt

SEQ ID NO: 4236 - DNA, 29 bp, Homo sapiens
ctacatcacagatcygccagagttggtga

SEQ ID NO: 4237 - DNA, 29 bp, Homo sapiens
cactttgaacattayggcccagctcactc

SEQ ID NO: 4238 - DNA, 29 bp, Homo sapiens
agccaagggtaccakgctatcgagacaat

SEQ ID NO: 4239 - DNA, 29 bp, Homo sapiens
aattaagttgacatwgccagtgtgagtcc

SEQ ID NO: 4240 - DNA, 29 bp, Homo sapiens
catccaagttggagraaaaaaattctcat

SEQ ID NO: 4241 - DNA, 29 bp, Homo sapiens
tttacagtgattttytaagttaactcatt

SEQ ID NO: 4242 - DNA, 29 bp, Homo sapiens
cctgctctgtgatgmactgtgcgaggtgc

SEQ ID NO: 4243 - DNA, 29 bp, Homo sapiens
ctgttgtggaagatyagcgagacataaag

SEQ ID NO: 4244 - DNA, 29 bp, Homo sapiens
tatgtgtgaccttgmgtttcccagcctct

SEQ ID NO: 4245 - DNA, 29 bp, Homo sapiens
tctctcaaaaaaatrtatagacaataaca

SEQ ID NO: 4246 - DNA, 29 bp, Homo sapiens
tttgtctccccagcragtggcattaagcc

SEQ ID NO: 4247 - DNA, 29 bp, Homo sapiens
atggtagttattctrctaggtcttacact

SEQ ID NO: 4248 - DNA, 29 bp, Homo sapiens
ggtacacactaggcrctccatggatgcac

What is claimed is:

1. A method of identifying a metabolic syndrome phenotype for an organism, the method comprising:
detecting, in a biological sample from the organism, a polymorphism of a gene or a locus closely linked thereto, the gene selected from those listed in Tables 1-14, 17 and 18, wherein the polymorphism is associated with the metabolic syndrome phenotype; and,
correlating the polymorphism to the metabolic syndrome phenotype, thereby identifying the metabolic syndrome phenotype.

2. The method of claim 1, wherein the metabolic syndrome phenotype comprises a diagnosis of or predisposition to metabolic syndrome, insulin resistance, high blood pressure, dyslipidemia, diabetes, myocardial infarction or obesity.

3. The method of claim 2 wherein the metabolic syndrome phenotype is altered triglyceride levels.

4. The method of claim 3 wherein the polymorphism is in the MLXIPL region on chromosome 7 at 7q11.23.

5. The method of claim 4 wherein the polymorphism is in or proximal to a gene located in the MLXIPL region on chromosome 7 at 7q11.23, listed in Table 18.

6. The method of claim 3 wherein the metabolic syndrome phenotype is higher plasma triglyceride levels.

7. The method of claim 6 wherein the polymorphism is a single nucleotide polymorphism (SNP) in the MLXIPL gene or a gene or a locus closely linked thereto.

8. The method of claim 6 wherein the polymorphism is an allele at a SNP selected from the group consisting of: a cytosine at position rs1375388, an adenine at rs1448972, a guanine at rs 6844155, a cytosine at rs4960288, an adenine at rs 12056034, a thymine at rs 17145732, a cytosine at rs 3812316, an adenine at rs799160, a thymidine at rs325, an adenine at rd326, a cytosine at rs328, a cytosine at rs17410914, a thymidine at rs4406409, a cytosine at rs1558861, a guanine at rs2075292, an adenine at rs7124741, an adenine at rs17120139, a cytosine at rs9508032, a cytosine at rs9513115, a cytosine at rs9895521, a cytosine at rs747398, an adenine at rs4824743.

9. The method of claim 3 wherein the polymorphism is in the vicinity of the APOA1-APOA3-APOA4-APOA5 cluster.

10. The method of claim 9 wherein the polymorphism is at or proximal to a gene listed in Table 18.

11. The method of claim 3 wherein the polymorphism is a single nucleotide polymorphism (SNP) in the LPL gene or a gene or a locus closely linked thereto.

12. The method of claim 10 or 11 wherein the polymorphism is in a gene listed in Table 18.

13. The method of claim 2 wherein the metabolic syndrome phenotype is lower high density lipoprotein levels.

14. The method of claim 13 wherein the polymorphism is an ellele at a single nucleotide polymorphism (SNP) selected from the group consisting of: a thymidine at rs2992753, an adenine at rs2819770, a thymine at rs17145732, a thymine at rs325, an adenine at rs326, a cytosine at rs328, a thymine at rs9282541, a guanine at rs11858164, a thymine at rs2217332, a guanine at rs711752, a guanine at rs7205804, a cytosine at rs5880, an adenine at rs5882, an adenine at rs1800777, and an adenine at rs4824743.

15. The method of claim 2 wherein the metabolic syndrome phenotype is altered blood pressure.

16. The method of claim 15 wherein the metabolic syndrome phenotype is high blood pressure.

17. The method of claim 16 wherein the polymorphism is a guanine at rs5174.

18. The method of claim 2 wherein the metabolic syndrome phenotype is susceptibility to metabolic syndrome.

19. The method of claim 18 wherein the polymorphism is a guanine at rs1354746 or a guanine at rs7205804.

20. The method of claim 1, wherein the organism is a mammal, or the biological sample is derived from a mammal.

21. The method of claim 1, wherein the organism is a human patient, or the biological sample is derived from a human patient.

22. The method of claim 1, wherein the detecting comprises amplifying the polymorphism or a sequence associated therewith and detecting the resulting amplicon.

23. The method of claim 22, wherein the amplifying comprises:
a) admixing an amplification primer or amplification primer pair with a nucleic acid template isolated from the organism or biological sample, wherein the primer or primer pair is complementary or partially complementary to at least a portion of the gene or closely linked polymorphism, or to a proximal sequence thereto, and is capable of initiating nucleic acid polymerization by a polymerase on the nucleic acid template; and,
b) extending the primer or primer pair in a DNA polymerization reaction comprising a polymerase and the template nucleic acid to generate the amplicon.

24. The method of claim 22, wherein the amplicon is detected by a process that includes one or more of: hybridizing the amplicon to an array, digesting the amplicon with a restriction enzyme, or real-time PCR analysis.

25. The method of claim 22, comprising partially or fully sequencing the amplicon.

26. The method of claim 22, wherein the amplifying comprises performing a polymerase chain reaction (PCR), reverse transcriptase PCR (RT-PCR), or ligase chain reaction (LCR) using nucleic acid isolated from the organism or biological sample as a template in the PCR, RT-PCR, or LCR.

27. The method of claim 1, wherein the polymorphism is a SNP.

28. The method of claim 1, wherein the polymorphism comprises an allele selected from the group consisting of those listed in Tables 1-14, 17 or 18.

29. The method of claim 1, wherein the closely linked locus is about 5 cM or less from the gene.

30. The method of claim 1, wherein correlating the polymorphism comprises referencing a look up table that comprises correlations between alleles of the polymorphism and the phenotype.

31. The method of claim 1, wherein the organism is a non-human mammal and the method further comprises selecting the non-human mammal from a population of non-human mammals, based upon the phenotype.

32. The method of claim 31, comprising breeding the resulting selected non-human mammal with another non-human mammal to optimize the phenotype in one or more offspring.

33. A method of identifying a modulator of a metabolic syndrome phenotype, the method comprising:
contacting a potential modulator to a gene or gene product, wherein the gene or gene product is encoded by a gene or locus listed in Tables 1-14, 17 or 18; and,
detecting an effect of the potential modulator on the gene or gene product, thereby identifying whether the potential modulator modulates the metabolic syndrome phenotype.

34. The method of claim 33, wherein the metabolic syndrome phenotype comprises a diagnosis of or predisposition to metabolic syndrome, insulin resistance, high blood pressure, dyslipidemia, diabetes, myocardial infarction or obesity.

35. The method of claim 33, wherein the gene or gene product comprises a polymorphism selected from those listed in Tables 1-14, 17 or 18.

36. The method of claim 33, wherein the effect is increased or decreased expression of a gene or gene product encoded by one or more genetic loci listed in Tables 1-14, 17 or 18 in the presence of the modulator.

37. A kit for treatment of a metabolic syndrome phenotype, the kit comprising a modulator identified by the method of claim 33 and instructions for administering the compound to a patient to treat the metabolic syndrome phenotype.

38. The kit of claim 37, wherein the metabolic syndrome phenotype comprises a diagnosis of or predisposition to metabolic syndrome, insulin resistance, high blood pressure, dyslipidemia, diabetes, myocardial infarction or obesity.

39. A system for identifying a metabolic syndrome phenotype for an organism or biological sample derived therefrom, the system comprising:
a) a set of marker probes or primers configured to detect at least one allele of one or more gene or linked locus associated with the metabolic syndrome phenotype, wherein the gene or linked locus is one of those listed in Tables 1-14, 17 or 18;
b) a detector that is configured to detect one or more signal outputs from the set of marker probes or primers, or an amplicon produced from the set of marker probes or primers, thereby identifying the presence or absence of the allele; and,
c) system instructions that correlate the presence or absence of the allele with the predicted metabolic syndrome phenotype, thereby identifying the metabolic syndrome phenotype for the organism or biological sample derived therefrom.

40. The system of claim 39, wherein the metabolic syndrome phenotype comprises a diagnosis of or predisposition to metabolic syndrome, insulin resistance, high blood pressure, dyslipidemia, diabetes, myocardial infarction or obesity.

41. The system of claim 39, wherein the set of marker probes comprises a nucleotide sequence provided in Tables 1-14, 17 or 18.

42. The system of claim 39, wherein the detector detects at least one light emission, wherein the light emission is indicative of the presence or absence of the allele.

43. The system of claim 39, wherein the instructions comprise at least one look-up table that includes a correlation between the presence or absence of the allele and the metabolic syndrome phenotype.

44. The system of claim 39, wherein the system comprises a sample.

45. The system of claim 44, wherein the sample comprises genomic DNA, amplified genomic DNA, cDNA, amplified cDNA, RNA, or amplified RNA.

46. The system of claim 44, wherein the sample is derived from a mammal.

47. A method of predicting if an individual is at risk of developing a metabolic syndrome phenotype comprising:
a) genotyping said individual at genetic loci that are genetically linked to at least two genes associated with said metabolic syndrome phenotype; and
b) determining if the genotypes generated in a) comprise alleles that positively correlate to susceptibility to said metabolic syndrome phenotype, wherein if said alleles do positively correlate to susceptibility to said metabolic syndrome phenotype then said individual is determined to be at risk of developing said metabolic syndrome phenotype.

48. The method of claim 47, wherein the metabolic syndrome phenotype is metabolic syndrome and the at least two genes are listed in Table 1.

49. The method of claim 47, wherein the metabolic syndrome phenotype is diabetes and the at least two genes are genes listed in Table 2.

50. The method of claim 47, wherein the metabolic syndrome phenotype is myocardial infarction and the at least two genes are listed in Table 3.

51. The method of claim 47, wherein the metabolic syndrome phenotype is hypertension and the at least two genes are listed in Table 4.

52. The method of claim 47, wherein the metabolic syndrome phenotype is obesity and the at least two genes are listed in Table 5 and/or Table 6.

53. The method of claim 47, wherein the metabolic syndrome phenotype is high diastolic blood pressure and the at least two genes are listed in Table 7.

54. The method of claim 47, wherein the metabolic syndrome phenotype is high systolic blood pressure and the at least two genes are listed in Table 8.

55. The method of claim 47, wherein the metabolic syndrome phenotype is low HDL levels and the at least two genes are listed in Table 9.

56. The method of claim 47, wherein the metabolic syndrome phenotype is high fasting triglyceride levels and the at least two genes are listed in Table 10.

57. The method of claim 47, wherein the metabolic syndrome phenotype is high insulin levels and the at least two genes are listed in Table 11 and/or Table 12.

58. The method of claim 47, wherein the metabolic syndrome phenotype is insulin resistance and the at least two genes are listed in Table 13 and/or Table 14.

59. The method of claim 47, wherein said determining comprises referencing a look up table containing results from an association study, said association study comprising comparing allele frequencies for said genetic loci from individuals in a case group to allele frequencies for said genetic loci from individuals in a control group, wherein said results identify at least one allele that is more frequent in said case group than in said control group positively correlating to susceptibility to said metabolic syndrome phenotype.

60. A method of identifying a modulator of a metabolic syndrome phenotype, the method comprising administering a modulator of a gene or gene product, wherein the gene or gene product is encoded by a gene or locus listed in Tables 1-14, 17 or 18 to a non-human mammal or ex vivo mammalian cell, and measuring an effect indicative of a metabolic syndrome phenotype.

61. The method of claim 60, wherein the metabolic syndrome phenotype is obesity, hypertension, atherogenic dyslipidemia, diabetes, abnormal insulin levels, insulin resistance, glucose intolerance, risk of myocardial infarction, chronic prothrombotic state, or chronic proinflammatory state.

62. A method of identifying a metabolic syndrome phenotype for an organism, the method comprising:
detecting, in a biological sample from the organism, a haplotype in a genomic region comprising an allele selected from the alleles listed in Tables 1-14, 17 or 18; and
correlating the haplotype to the metabolic syndrome phenotype, thereby identifying the metabolic syndrome phenotype.

63. A method for identifying a human subject at increased risk for a metabolic syndrome phenotype, comprising using an in vitro assay to detect the presence of a risk allele provided in Table 18 in a human subject that is more frequently present in a population of humans with the metabolic syndrome phenotype than in a population of humans that do not have the metabolic syndrome phenotype, wherein the presence of the risk allele indicates that the human subject has an increased risk for the metabolic syndrome phenotype.

64. The method of claim 63 wherein the metabolic syndrome phenotype is high triglyceride levels and the risk allele is selected from the group consisting of a cytosine at position rs1375388, an adenine at rs1448972, a guanine at rs6844155, a cytosine at rs4960288, an adenine at rs12056034, a thymine at rs17145732, a cytosine at rs3812316, an adenine at rs799160, a thymine at rs325, an adenine at rs326, a cytosine at rs328, a cytosine at rs17410914, a thymine at rs4406409, a cytosine at rs1558861, a guanine at rs2075292, an adenine at rs7124741, an adenine at rs17120139, a cytosine at rs9508032, a cytosine at rs9513115, a cytosine at rs9895521, a cytosine at rs747398, and an adenine at rs4824743.

65. The method of claim 63 wherein the metabolic syndrome phenotype is lower high density lipoprotein levels and the risk allele is selected from the group consisting of a thymine at rs2992753, an adenine at rs2819770, a thymine at rs17145732, a thymine at rs325, an adenine at rs326, a cytosine at rs328, a thymine at rs9282541, a guanine at rs11858164, a thymine at rs2217332, a guanine at rs711752, a guanine at rs7205804, a cytosine at rs5880, an adenine at rs5882, an adenine at rs1800777, and an adenine at rs4824743.

66. The method of claim 63 wherein the metabolic syndrome phenotype is high blood pressure and the risk allele is a guanine at rs5174.

67. The method of claim 63 wherein the metabolic syndrome phenotype is metabolic syndrome and the risk allele is a guanine at rs1354746 or rs7205804.

68. A method for identifying a human subject at increased risk for coronary heart disease, comprising using an in vitro assay to detect the presence of a polymorphism with a linkage disequilibrium of at least r²=0.8 with a risk allele provided in Table 18 in a human subject, wherein the presence of the polymorphism indicates that the human subject has an increased risk for coronary heart disease.

69. The method of claim 63, wherein detecting the risk allele comprises detecting a single nucleotide polymorphism (SNP) allele.

70. A method for determining whether a human subject is at increased risk for a metabolic syndrome phenotype, comprising using an in vitro assay to detect the presence of a haplotype comprising a risk allele provided in table 19 in a human subject, wherein the presence of the haplotype indicates that the human subject has an increased risk for the metabolic syndrome phenotype.

71. The method of claim 70, wherein the metabolic syndrome phenotype is high triglyceride levels and the haplotype comprises one or more of the following: a cytosine at position rs1375388, an adenine at rs1448972, a guanine at rs6844155, a cytosine at rs4960288, an adenine at rs12056034, a thymine at rs17145732, a cytosine at rs3812316, an adenine at rs799160, a thymine at rs325, an adenine at rs326, a cytosine at rs328, a cytosine at rs17410914, a thymine at rs4406409, a cytosine at rs1558861, a guanine at rs2075292, an adenine at rs7124741, an adenine at rs17120139, a cytosine at rs9508032, a cytosine at rs9513115, a cytosine at rs9895521, a cytosine at rs747398, and an adenine at rs4824743.

72. The method of claim 70, wherein the metabolic syndrome phenotype is lower high density lipoprotein levels and the haplotype comprises one or more of the following: a thymine at rs2992753, an adenine at rs2819770, a thymine at rs17145732, a thymine at rs325, an adenine at rs326, a cytosine at rs328, a thymine at rs9282541, a guanine at rs11858164, a thymine at rs2217332, a guanine at rs711752, a guanine at rs7205804, a cytosine at rs5880, an adenine at rs5882, an adenine at rs1800777, and an adenine at rs4824743.

73. The method of claim 70, wherein the metabolic syndrome phenotype is high blood pressure and the haplotype comprises a guanine at rs5174.

74. The method of claim 70, where in the metabolic syndrome phenotype is metabolic syndrome and the haplotype comprises either a guanine at rs1354746 or a guanine at rs7205804.

75. The method of claim 63, wherein the human subject is heterozygous for the risk allele.

76. The method of claim 70, wherein the human subject is heterozygous for the haplotype.

77. A method for identifying a human subject at increased risk for a metabolic syndrome phenotype, comprising using an in vitro assay to detect the genotype of a SNP provided in Table 18, wherein the genotype of the SNP indicates that the human subject has an increased risk for the metabolic syndrome phenotype.

78. The method of claim 77, wherein the metabolic syndrome phenotype is high triglyceride levels and the genotype of the SNP is selected from the group consisting of: a cytosine at position rs1375388, an adenine at rs1448972, a guanine at rs6844155, a cytosine at rs4960288, an adenine at rs12056034, a thymine at rs17145732, a cytosine at rs3812316, an adenine at rs799160, a thymine at rs325, an adenine at rs326, a cytosine at rs328, a cytosine at rs17410914, a thymine at rs4406409, a cytosine at rs1558861, a guanine at rs2075292, an adenine at rs7124741, an adenine at rs17120139, a cytosine at rs9508032, a cytosine at rs9513115, a cytosine at rs9895521, a cytosine at rs747398, and an adenine at rs4824743.

79. The method of claim 77, wherein the metabolic syndrome phenotype is lower high density lipoprotein levels and the genotype of the SNP is selected from the group consisting a thymine at rs2992753, an adenine at rs2819770, a thymine at rs17145732, a thymine at rs325, an adenine at rs326, a cytosine at rs328, a thymine at rs9282541, a guanine at rs11858164, a thymine at rs2217332, a guanine at rs711752, a guanine at rs7205804, a cytosine at rs5880, an adenine at rs5882, an adenine at rs1800777, and an adenine at rs4824743.

80. The method of claim 77, wherein the metabolic syndrome phenotype is high blood pressure and the genotype of the SNP is a guanine at rs5174.

81. The method of claim 77, wherein the metabolic syndrome phenotype is metabolic syndrome and the genotype of the SNP is either a guanine at rs1354746 or a guanine at rs7205804.

82. A kit comprising one or more components for detecting the presence of a risk allele provided in Table 18 in a human subject.
